(19) United States
(12) Patent Application Publication
(10) Pub. No.: US 2004/0010815 A1
(43) Pub. Date: Jan. 15, 2004

(54) Identification and characterization of plant genes

(76) Inventors: B. Markus Lange, San Diego, CA (US); Majid Ghassemian, Carlsbad, CA (US); Steven P. Briggs, Del Mar, CA (US); Bret Cooper, La Jolla, CA (US); Jane Glazebrook, San Diego, CA (US); Stephen Arthur Goff, Encinitas, CA (US); Fumiaki Katagiri, San Diego, CA (US); Joel Kreps, Carlsbad, CA (US); Todd Moughamer, San Diego, CA (US); Nicholas Provart, Toronto (CA); Darrell Ricke, San Diego, CA (US); Tong Zhu, San Diego, CA (US)

Correspondence Address: TORREY MESA RESEARCH INSTITUTE, INTELLECTUAL PROPERTY DEPARTMENT, 3115 MERRYFIELD ROW, SAN DIEGO, CA, 92121, US

(21) Appl. No.: 10/259,194

(22) Filed: Sep. 26, 2002

Related U.S. Application Data
(60) Provisional application No. 60/325,277, filed on Sep. 26, 2001.
(60) Provisional application No. 60/370,743, filed on Apr. 4, 2002.
(60) Provisional application No. 60/370,620, filed on Apr. 4, 2002.
(60) Provisional application No. 60/325,277, filed on Sep. 26, 2001.

(51) Int. Cl. A01H 1/00; C07H 21/04; C12N 9/10; C12N 15/82

(52) U.S. Cl. 800/278; 536/23.2; 435/193; 435/419

(57) ABSTRACT

Disclosed are polynucleotide and polypeptide sequences involved in or associated with isoprenoid biosynthesis in plants. Also disclosed are uses for such sequences.

### CROSS REFERENCE TO RELATED APPLICATIONS

[0001] This application claims the benefits of U.S. Provisional Application Serial No. 60/325,277 filed Sep. 26, 2001, U.S. Provisional Application Serial No. 60/370,743 filed Apr. 4, 2002, and U.S. Provisional Application Serial No. 60/370,620 filed Apr. 4, 2002, each of which is incorporated herein by reference in its entirety for all purposes

### REFERENCE TO MATERIAL SUBMITTED ON COMPACT DISC

[0002] The sequence listing accompanying this application is contained on compact disc. The material on the CD-ROM (filed in duplicate herewith), on CD volume labeled “Copy 1” and “Copy 2”, each containing a text file named “70029NP_SEQ_LST” created Sep. 26, 2002, having a size of 1.46 MB, is hereby incorporated by reference in its entirety pursuant to 37 C.F.R. §1.52(e)(5).

### BACKGROUND

[0003] The present invention is in the area of plant biotechnology. In particular, the invention relates to a set of genes the expression products of which are involved in isoprenoid metabolism.

[0004] The isoprenoid biosynthetic pathway provides intermediates for the synthesis of a multitude of natural products which serve numerous biochemical functions in plants: sterols (isoprenoids with a C30 backbone) are essential components of membranes; carotenoids (C40) and chlorophylls (which contain a C20 isoprenoid side chain) act as photosynthetic pigments; plastoquinone, phylloquinone and ubiquinone (all of which contain long-chain isoprenoid side chains) participate in electron transport chains; gibberellins (C20), brassinosteroids (C30) and abscisic acid (C15) are phytohormones derived from isoprenoid intermediates; prenylation of proteins (with C15 or C20 isoprenoid moieties) is involved in subcellular targeting and regulation of activity; and several monoterpenes (C 10), sesquiterpenes (C 15) and diterpenes (C20) have been demonstrated to be involved in plant defense.

[0005] Conceptually, isoprenoid biosynthesis can be divided into four stages. Stage 1 includes the formation of isopentenyl diphosphate (IPP) and dimethylallyl alcohol (DMAPP). In plants, two separate pathways are utilized for the synthesis of these universal C5 intermediates (Lange et al., Proc Natl. Acad. Sci. USA, 97:13172-13177, 2000): the mevalonate pathway, which is responsible for the synthesis of certain sesquiterpenes, sterols (Nes and Venkatrarnesh, Crit. Rev. Biochem. Mol. Biol., 34:81-93, 1999) and for the side chain of ubiquinone (Disch et al., Biochem. J, 15:615-621, 1998), operates in the cytosol; the mevalonate-independent pathway, which is used for the synthesis of isoprene, monoterpenes, certain sesquiterpenes, diterpenes, carotenoids, as well as the side chains of tocopherol, phylloquinone and chlorophyll, is localized to plastids (Eisenreich et al., Trends Plant Sci., 6:78-84, 2001). Stage 2 begins with the isomerization of IPP to DMAPP, the latter of which then serves as the reactive starter molecule for subsequent condensation reactions with IPP to form geranyl diphosphate (GPP, C₁₀), famesyl diphosphate (FPP, C15), geranylgeranyl diphosphate (GGPP, C20), squalene (C30), phytyl diphosphate (C40), phytoene (C40) and higher prenyl diphosphates (Ogura, In: Comprehensive Natural Products Chemistry, Vol 2: Isoprenoids Including Carotenoids and Steroids, D. E. Cane, ed., Pergamon Press, 1999). In stage 3, these prenyl diphosphates, or compounds directly derived from them, undergo a range of cyclization reactions to produce the parent skeletons of the different monoterpens from GPP, sesquiterpenes from FPP, diterpenes from GGPP, triterpenes (sterols) from 2,3-epoxysqualene, and tetraterpenes (carotenoids) from lycopene. The cyclic parent compounds are then transformed in stage 4 by redox, isomerization, substitution and conjugation reactions to yield the various isoprenoid end-products.

### SUMMARY

[0006] Within the scope of the present invention a set of genes is now provided which are involved in isoprenoid metabolism, but especially a set of genes comprising nucleic acid sequences derived from the rice genome including homologs and orthologs thereof. One of the main objectives of the present invention is thus to provide an isolated nucleic acid molecule comprising a nucleotide sequence encoding a polypeptide which is involved in isoprenoid metabolism of plants, but especially of cereal plants such as rice, wheat, barley, maize, etc.

[0007] The majority of the genes within this group encode protein products that are directly involved in or associated with the major pathways of isoprenoid metabolism: plastididal biosynthetic pathways; cytosolic and mitochondrial biosynthetic pathways; pathways leading to monoterpenes and sesquiterpenes; pathways leading to protein phenylation.

[0008] In one embodiment, the invention thus relates to an isolated nucleic acid molecule comprising a nucleotide sequence encoding a polypeptide that is involved in at least one of the major pathways of isoprenoid metabolism selected from the group consisting of SEQ ID NOs: 1-414 including homologs and orthologs thereof or the complement thereof.

[0009] Another subset of genes provided herein comprises a number of genes that encode polypeptides that are involved in or associated with plastididal biosynthetic pathways. Exemplary representatives of such genes and polypeptides are those identified in Table 1 and listed in the Sequence Listing.

[0010] Still another subset of genes that is provided as part of the invention comprises nucleic acid molecules that encode polypeptides that are involved in or associated with the cytosolic and mitochondrial biosynthetic pathways. Exemplary representatives of such genes and polypeptides are those identified in Table 1 and listed in the Sequence Listing.

[0011] A further subset of genes provided herein comprise nucleic acid molecules the expression products of which are involved in or associated with pathways leading to monoterpenes and sesquiterpenes. Exemplary representatives of such genes and polypeptides are those identified in Table 1 and listed in the Sequence Listing.

[0012] Still another subset of genes provides nucleic acid molecules the expression products of which are involved in or associated with pathways leading to protein phenylation. Exemplary representatives of such genes and polypeptides are those identified in Table 1 and listed in the Sequence Listing.

[0013] In a collective embodiment, applicable to all of the nucleic acid molecules disclosed herein, the invention relates to the use of the nucleic acid molecules according to the invention as hybridization probes, for chromosome and gene mapping, in PCR technologies, in the production of sense or antisense nucleic acids, in screening for new therapeutic molecules, in production of plants and seeds having desirable, inheritable, commercially useful phenotypes, or in discovery of inhibitory compounds.

[0014] The invention further relates to any polypeptides encoded by the nucleic acid molecules according to the invention, or any antigene sequences thereof, which have numerous applications using techniques that are known to those skilled in the art of molecular biology, biotechnology, biochemistry, genetics, physiology or pathology.

[0015] In a further collective embodiment, the present invention provides the ability to modulate isoprenoid metabolism, by over-expressing, under-expressing or knocking out one or more of the genes disclosed herein or their gene products, in a plant cell, in vitro or in planta. Expression vectors comprising at least one nucleic acid molecule according to the invention, or any antigenes thereof, operably linked to at least one suitable promoter and/or regulatory sequence can be used to study the role of polypeptides encoded by said sequences, for example by transforming a host cell with said expression vector and measuring the effects of overexpression and underexpression of said nucleic acid molecules. Suitable promoter and/or regulatory sequences include especially those that are preferentially or specifically active in specific plant tissues such as, for example, green tissues (leaf, stem), grain tissues (the grain endosperm or the grain embryo), flowers, fruits, etc.

[0016] A host cell transformed with at least one expression vector comprising at least one nucleic acid molecule of the invention, operably linked to suitable promoters and/or regulatory sequences, can be useful to produce a plant with improved nutritional or dietary pharmacological properties.

[0017] In a further collective embodiment, the present invention provides a transformed plant host cell, or one obtained through breeding, capable of over-expressing, under-expressing, or having a knock out of at least one of the genes according to the invention and/or their gene products.

[0018] Such a plant cell, transformed with at least one expression vector comprising a nucleic acid molecule of the invention, operably linked to suitable promoters and/or regulatory sequences, can be used to regenerate plant tissue or an entire plant, or seed there from, in which the effects of expression, including overexpression or underexpression, of the introduced sequence or sequences can be measured in vitro or in planta.

[0019] In a further embodiment the present invention provides nucleotide sequences including regions of nucleotide sequence encoding polypeptides having homology to at least one functional protein domain (FPD). Embodiments of the invention further provide polypeptides including regions of amino acid sequence having homology to an FPD. In cases where the polypeptide has homology to an FPD in the same or closely related species, the polypeptide may represent a paralogous sequence or paralog, or may represent a variant allele of a gene encoding the FPD. In cases where the polypeptide has homology to an FPD in another species, including other plant species and especially non-plant species, polypeptides may represent orthologous sequences, or orthologs, of the FPD.

[0020] In a further collective embodiment of the invention the nucleic acid molecules disclosed herein or respresentative parts thereof can be used in hybridization-based assays for detecting and identifying nucleic acid molecules that encode protein products that are involved in isoprenoid metabolism in plants other than rice, but especially in plants belonging to the cereal group.

[0021] Embodiments of the present invention provide a unique oligonucleotide having a sequence identical to or complementary to a region of a polynucleotide sequence encoding at least a portion of a homologue of a protein according to the invention representatives of which are identified by the SEQ ID NOs provided in the Sequence Listing and/or an FPD thereof, the oligonucleotide being identified by the methods disclosed herein. In one embodiment, the unique oligonucleotide has a length of between 12 and 250 nucleotide bases.

[0022] Embodiments of the present invention also provide a nucleotide microarray comprising the unique oligonucleotide having a sequence identical to or complementary to a region of polynucleotide sequence encoding at least a portion of a homologue of a protein according to the invention representatives of which are identified by the SEQ ID NOs provided in the Sequence Listing and/or an FPD thereof. Preferably, the microarray includes a plurality of different, unique oligonucleotides, the sequences corresponding to a plurality of homologues of a protein according to the invention representatives of which are identified by the SEQ ID NOs provided in the Sequence Listing and/or an FPD thereof. Equally preferably, the microarray contains at least about 96 different unique oligonucleotides, wherein each of the 96 different unique oligonucleotides has a sequence that is identical, complementary, or has substantial similarity to a segment of a nucleotide sequence as given in the SEQ ID NOs provided in the Sequence Listing.

[0023] Embodiments of the present invention also provide a kit for detecting the presence of a polynucleotide, the kit containing a first nucleotide probe which can hybridize with a region of a nucleotide sequence including the nucleotide sequences of the SEQ ID NOs provided in the Sequence Listing, a fragment or a variant thereof, and a complementary sequence thereto, the kit further containing at least one additional component such as, for example: a second nucleotide probe, a buffer, an enzyme, a label, a molecular weight standard, a reaction chamber, and a micropipette tip.

[0024] Embodiments of the present invention further provide a kit for detecting the presence of a polypeptide, the kit containing a first probe which can hybridize with a region of a polypeptide including the amino acid sequences of the SEQ ID NOs provided in the Sequence Listing, a fragment or a variant thereof, and optionally, the kit further containing at least one additional component such as, for example: a probe, a buffer, an enzyme, a label, a molecular weight standard, a reaction chamber, and a micropipette tip. Probes useful in kit embodiments include antibodies, affinity tags, protein A, protein G, or protein-binding substances including chromatographic media.

[0025] In a further embodiment of the invention a computer readable medium containing one or more of the nucleotide sequences of the invention is provided as well as methods of use for the computer readable medium. This medium allows a nucleotide sequence corresponding to at least one of the SEQ ID NOs provided in the Sequence Listing (open reading frames or fragments thereof), to be used as a reference sequence to search against a database. This medium also allows for computer-based manipulation of a nucleotide sequence corresponding to at least one of SEQ ID NOs provided in the Sequence Listing. Additional embodiments include An isolated polynucleotide comprising nucleotide sequence encoding a polypeptide involved in or associated with the biosynthesis of isoprenoids in a plant, wherein said nucleotide sequence comprises a) a nucleotide sequence selected from the group consisting of SEQ ID NO 1, 3, 5, 7, 9, 11, 13, 15, 17, 19, 21, 23, 25, 27, 28, 29, 31, 33, 35, 37, 39, 41, 43, 45, 47, 49, 51, 53, 55, 57, 59, 61, 63, 65, 67, 69, 71, 73, 75, 77, 79, 81, 83, 85, 87, 89, 91, 93, 95, 97, 99, 101, 103, 105, 107, 109, 111, 113, 115, 117, 119, 121, 123, 125, 127, 129, 131, 133, 135, 137, 139, 141, 143, 145, 147, 149, 151, 153, 155, 157, 159, 161, 163, 165, 167, 169, 171, 173, 175, 177, 179, 181, 183, 185, 187, 189, 191, 193, 195, 197, 199, 201, 203, 205, 207, 209, 211, 213, 215, 217, 219, 221, 223, 225, 227, 229, 231, 233, 235, 237, 239, 241, 243, 245, 247, 249, 251, 253, 255, 257, 259, 261, 263, 265, 267, 269, 271, 273, 275, 277, 279, 281, 283, 285, 287, 289, 291, 293, 295, 297, 299, 301, 303, 305, 307, 309, 311, 313, 315, 317, 319, 321, 323, 325, 327, 329, 331, 333, 335, 337, 339, 341, 343, 345, 347, 349, 351, 353, 355, 357, 359, 361, 363, 365, 367, 369, 371, 373, 375, 377, 379, 381, 383, 385, 387, 389, 391, 393, 395, 397, 399, 401, 403, 405, 407, 409, 411, and 413; b) a nucleotide sequence having substantial similarity to a nucleotide sequence of a); c) a nucleotide sequence of at least 15 nucleotides in length that hybridizes with a nucleotide sequence of a) or the complement thereof under stringent conditions d) a fragment of a nucleotide sequence of a) wherein said fragment encodes a polypeptide involved in or associated with the biosynthesis of isoprenoids in a plant; e) a nucleotide sequence complementary to a nucleotide sequence of a), b) or c); or f) a nucleotide sequence comprising a reverse complement to a nucleotide sequence of a), b) or c).

[0026] Another embodiment provides isolated polynucleotides comprising nucleotide sequence encoding a polypeptide involved in or associated with the biosynthesis of isoprenoids in a plant, wherein said polypeptide comprises an amino acid sequence selected from the group consisting of SEQ ID NO 2, 4, 6, 8, 10, 12, 14, 16, 18, 20, 22, 24, 26, 28, 30, 32, 34, 36, 38, 40, 42, 44, 46, 48, 50, 52, 54, 56, 58, 60, 62, 64, 66, 68, 70, 72, 74, 76, 78, 80, 82, 84, 86, 88, 90, 92, 94, 96, 98, 100, 102, 104, 106, 108, 110, 112, 114, 116, 118, 120, 122, 124, 126, 128, 130, 132, 314, 136, 138, 140, 142, 144, 146, 148, 150, 152, 154, 156, 158, 160, 162, 164, 166, 168, 170, 172, 174, 176, 178, 180, 182, 184, 186, 188, 190, 192, 194, 196, 198, 200, 202, 204, 206, 208, 210, 212, 214, 216, 218, 220, 222, 224, 226, 228, 230, 232, 234, 236, 238, 240, 242, 244, 246, 248, 250, 252, 254, 256, 258, 260, 262, 264, 266, 268, 270, 272, 274, 276, 278, 280, 282, 284, 286, 288, 290, 292, 294, 296, 298, 300, 302, 304, 306, 308, 310, 312, 314, 316, 318, 320, 322, 324, 326, 328, 330, 332, 334, 336, 338, 340, 342, 344, 346, 348, 350, 352, 354, 356, 358, 360, 362, 364, 366, 368, 370, 372, 374, 376, 378, 380, 382, 384, 386, 388, 390, 392, 394, 396, 398, 400, 402, 404, 406, 408, 410, 412 and 414.

[0027] Yet another embodiment provides an isolated polypeptide involved in or associated with the biosynthesis of isoprenoids in a plant, comprising an amino acid sequence selected from the group consisting of SEQ ID NO 2, 4, 6, 8, 10, 12, 14, 16, 18, 20, 22, 24, 26, 28, 30, 32, 34, 36, 38, 40, 42, 44, 46, 48, 50, 52, 54, 56, 58, 60, 62, 64, 66, 68, 70, 72, 74, 76, 78, 80, 82, 84, 86, 88, 90, 92, 94, 96, 98, 100, 102, 104, 106, 108, 110, 112, 114, 116, 118, 120, 122, 124, 126, 128, 130, 132, 314, 136, 138, 140, 142, 144, 146, 148, 150, 152, 154, 156, 158, 160, 162, 164, 166, 168, 170, 172, 174, 176, 178, 180, 182, 184, 186, 188, 190, 192, 194, 196, 198, 200, 202, 204, 206, 208, 210, 212, 214, 216, 218, 220, 222, 224, 226, 228, 230, 232, 234, 236, 238, 240, 242, 244, 246, 248, 250, 252, 254, 256, 258, 260, 262, 264, 266, 268, 270, 272, 274, 276, 278, 280, 282, 284, 286, 288, 290, 292, 294, 296, 298, 300, 302, 304, 306, 308, 310, 312, 314, 316, 318, 320, 322, 324, 326, 328, 330, 332, 334, 336, 338, 340, 342, 344, 346, 348, 350, 352, 354, 356, 358, 360, 362, 364, 366, 368, 370, 372, 374, 376, 378, 380, 382, 384, 386, 388, 390, 392, 394, 396, 398, 400, 402, 404, 406, 408, 410, 412 and 414. Also included are amino acid sequences having substantial similarity to the sequences disclosed above including those having conservative amino acid substitutions.

[0028] One embodiment provides an isolated polynucleotide comprising a nucleotide sequence or fragment thereof encoding a polypeptide involved in or associated with the biosynthesis of isopentenyl diphosphate (IPP) and dimethylallyl alcohol (DMAPP) in a plant plastid said nucleotide sequence selected from the group consisting of SEQ ID NO 99, 113, 153, 161, 267, and 413 as well as sequences having substantial similarity to these sequences.

[0029] Still another embodiment provides an isolated polynucleotide comprising a nucleotide sequence encoding a polypeptide involved in or associated with the biosynthesis of isopentenyl diphosphate (IPP) and dimethylallyl alcohol (DMAPP) in a plant plastid, said polypeptide comprising an amino acid sequence selected from the group consisting of SEQ ID NO 100, 114, 154, 162, 268 and 414.

[0030] Also provided are isolated polynucleotides comprising a nucleotide sequence encoding a polypeptide or fragment thereof with enzymatic activity involved in or associated with the biosynthesis of short-chain plastid prenyltransferases, said nucleotide sequence selected from the group consisting of SEQ ID NO 11, 47, 83, 125, 135, 229, 235, 243, 265, 299, 345, 371, 409 and 411 and sequences having substantial similarity to these sequences. Likewise is provided an isolated polynucleotide comprising a nucleotide sequence encoding a polypeptide with enzymatic activity involved in or associated with the biosynthesis of short-chain plastid prenyltransferases said polypeptide comprising an amino acid sequence selected from the group consisting of SEQ ID NO 12, 48, 84, 126, 136, 230, 236, 244, 266, 300, 346, 372, 410 and 412.

[0031] Yet another embodiment provides an isolated polynucleotide comprising a nucleotide sequence or fragment thereof encoding a polypeptide the activity of which is involved in or associated with the biosynthesis of gibberellins in plant, said nucleotide sequence selected from the group consisting of SEQ ID NO 25, 67, 75, 79, 97, 107, 141, 155, 173, 193, 203, 205, 223, 225, 253, 259, 261, 291, 297, 349, 359, 375, 377, and 399; isolated polynucleotides comprising a nucleotide sequence encoding a polypeptide the activity of which is involved in or associated with the biosynthesis of gibberellins in plants, said polypeptide comprising an amino acid sequence selected from the group consisting of SEQ ID NO 26, 68, 76, 80, 98, 108, 142, 156, 174, 194, 204, 206, 224, 226, 254, 260, 262, 292, 298, 350, 360, 376, 378, and 400; and sequences substantially similar to any of the preceding sequences and

[0032] A futher embodiment provides isolated polynucleotides comprising a nucleotide sequence or fragment thereof encoding a polypeptide which exhibits enzymatic activity involved in or associated with the biosynthesis of carotenoids and/or abscisic acids in plants, said nucleotide sequence selected from the group consisting of SEQ ID NO 27, 89, 103, 121, 205, 237, 245, 271, 275, 301, 313, 317, 383, 391, 395, 397 and 407; isolated polynucleotide comprising a nucleotide sequence encoding a polypeptide which exhibits enzymatic activity involved in or associated with the biosynthesis of carotenoids and/or abscisic acids in plants, said polypeptide comprising an amino acid sequence selected from the group consisting of SEQ ID NO 28, 90, 104, 122, 206, 238, 246, 272, 276, 302, 314, 318, 384, 392, 396, 398 and 408; and sequences substantially similar to any of the preceding sequences.

[0033] Still a further embodiment provides isolated polynucleotides comprising a nucleotide sequence or fragment thereof encoding a polypeptide which has enzymatic activity involved in or associated with the biosynthesis of tocopherols in plants, said nucleotide sequence selected from the group consisting of SEQ ID NO 89 and 275; isolated polynucleotides comprising a nucleotide sequence encoding a polypeptide which has enzymatic activity involved in or associated with the biosynthesis of tocopherols in plants, said polypeptide comprising an amino acid sequence selected from the group consisting of SEQ ID NO 90 and 276; and sequences substantially similar to the preceding sequences.

[0034] Another embodiment provides isolated polynucleotides comprising a nucleotide sequence or fragment thereof encoding a polypeptide with enzymatic activity involved in or associated with plastoquinone and/or phylloquinone biosynthesis in a plant, said nucleotide sequence selected from the group consisting of SEQ ID NO 17, 29, 85, 87, 89, 207, 213, 285, 393, 401; isolated polynucleotides comprising a nucleotide sequence encoding a polypeptide with enzymatic activity involved in or associated with plastoquinone and/or phylloquinone biosynthesis in a plant, said polypeptide comprising an amino acid sequence selected from the group consisting of SEQ ID NO 18, 30, 86, 88, 90, 208, 214, 286, 394, 402; and sequences substantially similar to the preceding sequences.

[0035] Also provides are isolated polynucleotides comprising a nucleotide sequence or fragment thereof encoding a polypeptide with enzymatic activity involved in or associated with the mevalonate pathway in plants, said nucleotide sequence selected from the group consisting of SEQ ID NO 111, 133, 165, 293, 315, 353, 365; isolated polynucleotide comprising a nucleotide sequence encoding a polypeptide with enzymatic activity involved in or associated with the mevalonate pathway in plants, said polypeptide comprising an amino acid sequence selected from the group consisting of SEQ ID NO 112, 134, 166, 294, 316, 354, 366; and sequences substantially similar to any of the preceding sequences.

[0036] Yet another aspect provides isolated polypeptides comprising a nucleotide sequence or a fragment thereof encoding a polypeptide with enzymatic activity involved in or associated with phytosterol and brassinosteroid metabolism in a plant, said nucleotide sequence selected from the group consisting of SEQ ID NO 3, 5, 13, 15, 21, 33, 35, 37, 45, 49, 59, 61, 65, 91, 95, 119, 123, 131, 147, 163, 169, 173, 183, 187, 195, 197, 219, 251, 269, 287, 303, 309, 311, 323, 329, 331, 333, 337, 341, 361, 367, 379, 389, and 405; isolated polypeptide comprising a nucleotide sequence encoding a polypeptide with enzymatic activity involved in or associated with phytosterol and brassinosteroid metabolism in a plant, said polypeptide comprising an amino acid selected from the group consisting of SEQ ID NO 4, 6, 14, 16, 22, 34, 36, 38, 46, 50, 60, 62, 66, 92, 96, 120, 124, 132, 148, 164, 170, 174, 184, 188, 196, 198, 220, 252, 270, 288, 304, 310, 312, 324, 330, 332, 334, 338, 342, 362, 368, 380, 390 and 406; and sequences substantially similar to any of the preceding sequences.

[0037] Still another aspect provides isolated polypeptides comprising a nucleotide sequence or fragment thereof encoding a polypeptide with activity involved in or associated with biosynthesis of ubiquinone in a plant said nucleotide sequence selected from the group consisting of SEQ ID NO 7, 239 and 381; isolated polypeptides comprising a nucleotide sequence encoding a polypeptide with activity involved in or associated with biosynthesis of ubiquinone in a plant said polypeptide comprising an amino acid sequence selected from the group consisting of SEQ ID NO 8, 240 and 382; and sequences having substantial similarity to any of the preceding sequences.

[0038] An additional embodiment provides an isolated polynucleotide comprising a nucleotide sequence or fragment thereof encoding a polypeptide with activity involved in or associated with the biosynthesis of monterpenes and sesquiterpenes in a plant, said polynucleotide comprising a nucleotide sequence selected from the group consisting of SEQ ID NO 1, 9, 19, 39, 41, 43, 51, 55, 57, 69, 71, 77, 81, 99, 101, 109, 115, 129, 137, 145, 151, 157, 159, 167, 171, 179, 181, 185, 201, 209, 211, 217, 227, 231, 233, 241, 247, 249, 257, 263, 273, 279, 281, 283, 305, 319, 321, 327, 347, 351, 357, 369, 375, 385, and 387; An isolated polynucleotide comprising a nucleotide sequence encoding a polypeptide with activity involved in or associated with the biosynthesis of monterpenes and sesquiterpenes in a plant, said polypeptide comprising an amino acid sequence selected from the group consisting of SEQ ID NO 2, 10, 20, 40, 42, 44, 52, 56, 58, 70, 72, 78, 82, 100, 102, 110, 116, 130, 138, 146, 152, 158, 160, 168, 172, 180, 182, 186, 202, 210, 212, 218, 228, 232, 234, 242, 248, 250, 258, 264, 274, 280, 282, 284, 306, 320, 322, 328, 348, 352, 358, 370, 376, 386, 388, and 404; and sequences substantially similar to any of the preceding sequences.

[0039] Another aspect provides isolated polynucleotide comprising a nucleotide sequence or fragment thereof encoding a polypeptide that is involved in or associated with protein prenylation, said nucleotide sequence selected from the group consisting of SEQ ID NO 23, 63, 189, 255, 289, 343, and 373; isolated polynucleotide comprising a nucleotide sequence encoding a polypeptide that is involved in or associated with protein prenylation, said polypeptide comprising an amino acid sequence selected from the group consisting of SEQ ID NO 24, 64, 190, 256, 290, 344, and 374; and sequences substantially similar to any of the preceding sequences.

[0040] Yet another embodiment provides an isolated polynucleotide comprising a nucleotide sequence or fragment thereof encoding a polypeptide involved in or associated with the biosynthesis of chlorophyll or heme, said nucleotide sequence selected from the group consisting of SEQ ID NO 31, 47, 53, 105, 117, 127, 139, 143, 149, 175, 177, 191, 199, 221, 277, 295, 307, 325, 335, 339, 355, and 363; isolated polynucleotides comprising a nucleotide sequence encoding a polypeptide involved in or associated with the biosynthesis of chlorophyll or heme, said polypeptide comprising an amino acid sequence selected from the group consisting of SEQ ID NO 32, 48, 54, 106, 118, 128, 140, 144, 150, 176, 178, 192, 200, 222, 278, 296, 308, 326, 336, 340, 356, and 364; and sequences substantially similar to any of the previous sequences.

[0041] Additional embodiments provides expression cassettes comprising any of the nucleotide sequences disclosed herein along with host cells and transgenic plants comprising said expressions cassettes.

[0042] Further aspects, features and advantages of this invention will become apparent from the detailed description of the preferred embodiments that follow.

### DETAILED DESCRIPTION

[0043] The following detailed description is provided to aid those skilled in the art in practicing the present invention. Even so, this detailed description should not be construed to unduly limit the present invention as modifications and variations in the embodiments discussed herein can be made by those of ordinary skill in the art without departing from the spirit or scope of the present inventive discovery.

[0044] All publications, patents, patent applications, public databases, public database entries, and other references cited in this application are herein incorporated by reference in their entirety as if each individual publication, patent, patent application, public database, public database entry, or other reference was specifically and individually indicated to be incorporated by reference.

[0045] For clarity, certain terms used in the specification are defined and presented as follows:

[0046] Definitions

[0047] The term “gene” is used broadly to refer to any segment of nucleic acid associated with a biological function. Thus, genes include coding sequences and/or the regulatory sequences required for their expression. For example, gene refers to a nucleic acid fragment that expresses mRNA or functional RNA, or encodes a specific protein, and which includes regulatory sequences. Genes also include nonexpressed DNA segments that, for example, form recognition sequences for other proteins. Genes can be obtained from a variety of sources, including cloning from a source of interest or synthesizing from known or predicted sequence information, and may include sequences designed to have desired parameters.

[0048] The term “native” or “wild type” gene refers to a gene that is present in the genome of an untransformed cell, i.e., a cell not having a known mutation.

[0049] A “marker gene” encodes a selectable or screenable trait.

[0050] The term “chimeric gene” refers to any gene that contains 1) DNA sequences, including regulatory and coding sequences, that are not found together in nature, or 2) sequences encoding parts of proteins not naturally adjoined, or 3) parts of promoters that are not naturally adjoined. Accordingly, a chimeric gene may comprise regulatory sequences and coding sequences that are derived from different sources, or comprise regulatory sequences and coding sequences derived from the same source, but arranged in a manner different from that found in nature.

[0051] A “transgene” refers to a gene that has been introduced into the genome by transformation and is stably maintained. Transgenes may include, for example, genes that are either heterologous or homologous to the genes of a particular plant to be transformed. Additionally, transgenes may comprise native genes inserted into a non-native organism, or chimeric genes. The term “endogenous gene” refers to a native gene in its natural location in the genome of an organism. A “foreign” gene refers to a gene not normally found in the host organism but that is introduced by gene transfer.

[0052] An “oligonucleotide” corresponding to a nucleotide sequence of the invention, e.g., for use in probing or amplification reactions, may be about 30 or fewer nucleotides in length (e.g., 9, 12, 15, 18, 20, 21 or 24, or any number between 9 and 30). Generally specific primers are upwards of 14 nucleotides in length. For optimum specificity and cost effectiveness, primers of 16 to 24 nucleotides in length may be preferred. Those skilled in the art are well versed in the design of primers for use processes such as PCR. If required, probing can be done with entire restriction fragments of the gene disclosed herein which may be 100's or even 1000's of nucleotides in length.

[0053] The terms “protein,” “peptide” and “polypeptide” are used interchangeably herein.

[0054] The nucleotide sequences of the invention can be introduced into any plant. The genes to be introduced can be conveniently used in expression cassettes for introduction and expression in any plant of interest. Such expression cassettes will comprise the transcriptional initiation region of the invention linked to a nucleotide sequence of interest. Preferred promoters include constitutive, tissue-specific, developmental-specific, inducible and/or viral promoters. Such an expression cassette is provided with a plurality of restriction sites for insertion of the gene of interest to be under the transcriptional regulation of the regulatory regions. The expression cassette may additionally contain selectable marker genes. The cassette will include in the 5′-3′ direction of transcription, a transcriptional and translational initiation region, a DNA sequence of interest, and a transcriptional and translational termination region functional in plants. The termination region may be native with the transcriptional initiation region, may be native with the DNA sequence of interest, or may be derived from another source. Convenient termination regions are available from the Ti-plasmid of A. tumefaciens, such as the octopine synthase and nopaline synthase termination regions. See also, Guerineau et al., Mol. Gen. Genet., 262:141, 1991; Proudfoot, Cell, 64:671, 1991; Sanfacon et al., Genes Devel., 5:141, 1991; Mogen et al., Plant Cell, 2:1261, 1990; Munroe et al., Gene, 91:151, 1990; Ballas et al., Nuc. Acids Res., 17:7891 1989; Joshi et al., Nuc. Acids, Res. 1987.

[0055] “Coding sequence” refers to a DNA or RNA sequence that codes for a specific amino acid sequence and excludes the non-coding sequences. It may constitute an “uninterrupted coding sequence”, i.e., lacking an intron, such as in a cDNA or it may include one or more introns bounded by appropriate splice junctions. An “intron” is a sequence of RNA which is contained in the primary transcript but which is removed through cleavage and re-ligation of the RNA within the cell to create the mature mRNA that can be translated into a protein.

[0056] The terms “open reading frame” and “ORF” refer to the amino acid sequence encoded between translation initiation and termination codons of a coding sequence. The terms “initiation codon” and “termination codon” refer to a unit of three adjacent nucleotides (‘codon’) in a coding sequence that specifies initiation and chain termination, respectively, of protein synthesis (mRNA translation).

[0057] A “functional RNA” refers to an antisense RNA, ribozyme, or other RNA that is not translated.

[0058] The term “RNA transcript” refers to the product resulting from RNA polymerase catalyzed transcription of a DNA sequence. When the RNA transcript is a perfect complementary copy of the DNA sequence, it is referred to as the primary transcript or it may be a RNA sequence derived from posttranscriptional processing of the primary transcript and is referred to as the mature RNA. “Messenger RNA” (mRNA) refers to the RNA that is without introns and that can be translated into protein by the cell. “cDNA” refers to a single- or a double-stranded DNA that is complementary to and derived from mRNA.

[0059] “Regulatory sequences” and “suitable regulatory sequences” each refer to nucleotide sequences located upstream (5′ non-coding sequences), within, or downstream (3′ non-coding sequences) of a coding sequence, and which influence the transcription, RNA processing or stability, or translation of the associated coding sequence. Regulatory sequences include enhancers, promoters, translation leader sequences, introns, and polyadenylation signal sequences. They include natural and synthetic sequences as well as sequences which may be a combination of synthetic and natural sequences. As is noted above, the term “suitable regulatory sequences” is not limited to promoters.

[0060] “5′ non-coding sequence” refers to a nucleotide sequence located 5′ (upstream) to the coding sequence. It is present in the fully processed mRNA upstream of the initiation codon and may affect processing of the primary transcript to mRNA, mRNA stability or translation efficiency (Turner et al., Mol. Biotech., 3:225, 1995).

[0061] “3′ non-coding sequence” refers to nucleotide sequences located 3′ (downstream) to a coding sequence and include polyadenylation signal sequences and other sequences encoding regulatory signals capable of affecting mRNA processing or gene expression. The polyadenylation signal is usually characterized by affecting the addition of polyadenylic acid tracts to the 3′ end of the mRNA precursor. The use of different 3′ non-coding sequences is exemplified by Ingelbrecht et al., Plant Cell, 1:671, 1989.

[0062] The term “translation leader sequence” refers to that DNA sequence portion of a gene between the promoter and coding sequence that is transcribed into RNA and is present in the fully processed mRNA upstream (5′) of the translation start codon. The translation leader sequence may affect processing of the primary transcript to mRNA, mRNA stability or translation efficiency.

[0063] “Signal peptide” refers to the amino terminal extension of a polypeptide, which is translated in conjunction with the polypeptide forming a precursor peptide and which is required for its entrance into the secretory pathway. The term “signal sequence” refers to a nucleotide sequence that encodes the signal peptide.

[0064] “Promoter” refers to a nucleotide sequence, usually upstream (5′) to its coding sequence, which controls the expression of the coding sequence by providing the recognition for RNA polymerase and other factors required for proper transcription.

[0065] “Promoter” includes a minimal promoter that is a short DNA sequence comprised of a TATA box and other sequences that serve to specify the site of transcription initiation, to which regulatory elements are added for control of expression. “Promoter” also refers to a nucleotide sequence that includes a minimal promoter plus regulatory elements that is capable of controlling the expression of a coding sequence or functional RNA. This type of promoter sequence consists of proximal and more distal upstream elements, the latter elements often referred to as enhancers. Accordingly, an “enhancer” is a DNA sequence which can stimulate promoter activity and may be an innate element of the promoter or a heterologous element inserted to enhance the level or tissue specificity of a promoter. It is capable of operating in both orientations (normal or flipped), and is capable of functioning even when moved either upstream or downstream from the promoter. Both enhancers and other upstream promoter elements bind sequence-specific DNA-binding proteins that mediate their effects. Promoters may be derived in their entirety from a native gene, or be composed of different elements derived from different promoters found in nature, or even be comprised of synthetic DNA segments. A promoter may also contain DNA sequences that are involved in the binding of protein factors which control the effectiveness of transcription initiation in response to physiological or developmental conditions.

[0066] The “initiation site” is the position surrounding the first nucleotide that is part of the transcribed sequence, which is also defined as position +1. With respect to this site all other sequences of the gene and its controlling regions are numbered. Downstream sequences (i.e., further protein encoding sequences in the 3′ direction) are denominated positive, while upstream sequences (mostly of the controlling regions in the 5′ direction) are denominated negative.

[0067] Promoter elements, particularly a TATA element, that are inactive or that have greatly reduced promoter activity in the absence of upstream activation are referred to as “minimal or core promoters.” In the presence of a suitable transcription factor, the minimal promoter functions to permit transcription. A “minimal or core promoter” thus consists only of all basal elements needed for transcription initiation, e.g., a TATA box and/or an initiator.

[0068] “Constitutive expression” refers to expression using a constitutive or regulated promoter. “Conditional” and “regulated expression” refer to expression controlled by a regulated promoter.

[0069] “Constitutive promoter” refers to a promoter that is able to express the open reading frame (ORF) that it controls in all or nearly all of the plant tissues during all or nearly all developmental stages of the plant. Each of the transcription-activating elements do not exhibit an absolute tissue-specificity, but mediate transcriptional activation in most plant parts at a level of ≧1% of the level reached in the part of the plant in which transcription is most active.

[0070] “Regulated promoter” refers to promoters that direct gene expression not constitutively, but in a temporally- and/or spatially-regulated manner, and includes both tissue-specific and inducible promoters. It includes natural and synthetic sequences as well as sequences which may be a combination of synthetic and natural sequences. Different promoters may direct the expression of a gene in different tissues or cell types, or at different stages of development, or in response to different environmental conditions. New promoters of various types useful in plant cells are constantly being discovered, numerous examples may be found in the compilation by Okamuro et al. (Biochem. Plants, 15:1, 1989). Typical regulated promoters useful in plants include but are not limited to safener-inducible promoters, promoters derived from the tetracycline-inducible system, promoters derived from salicylate-inducible systems, promoters derived from alcohol-inducible systems, promoters derived from glucocorticoid-inducible system, promoters derived from pathogen-inducible systems, and promoters derived from ecdysome-inducible systems.

[0071] “Tissue-specific promoter” refers to regulated promoters that are not expressed in all plant cells but only in one or more cell types in specific organs (such as leaves or seeds), specific tissues (such as embryo or cotyledon), or specific cell types (such as leaf parenchyma or seed storage cells). These also include promoters that are temporally regulated, such as in early or late embryogenesis, during fruit ripening in developing seeds or fruit, in fully differentiated leaf, or at the onset of senescence.

[0072] “Inducible promoter” refers to those regulated promoters that can be turned on in one or more cell types by an external stimulus, such as a chemical, light, hormone, stress, or a pathogen.

[0073] “Operably-linked” refers to the association of nucleic acid sequences on single nucleic acid fragment so that the function of one is affected by the other. For example, a regulatory DNA sequence is said to be “operably linked to” or “associated with” a DNA sequence that codes for an RNA or a polypeptide if the two sequences are situated such that the regulatory DNA sequence affects expression of the coding DNA sequence (i.e., that the coding sequence or functional RNA is under the transcriptional control of the promoter). Coding sequences can be operably-linked to regulatory sequences in sense or antisense orientation.

[0074] “Expression” refers to the transcription and/or translation of an endogenous gene, ORF or portion thereof, or a transgene in plants. For example, in the case of antisense constructs, expression may refer to the transcription of the antisense DNA only. In addition, expression refers to the transcription and stable accumulation of sense (mRNA) or functional RNA. Expression may also refer to the production of protein.

[0075] “Specific expression” is the expression of gene products which is limited to one or a few plant tissues (spatial limitation) and/or to one or a few plant developmental stages (temporal limitation). It is acknowledged that hardly a true specificity exists: promoters seem to be preferably switch on in some tissues, while in other tissues there can be no or only little activity. This phenomenon is known as leaky expression. However, with specific expression in this invention is meant preferable expression in one or a few plant tissues.

[0076] The “expression pattern” of a promoter (with or without enhancer) is the pattern of expression levels which shows where in the plant and in what developmental stage transcription is initiated by said promoter. Expression patterns of a set of promoters are said to be complementary when the expression pattern of one promoter shows little overlap with the expression pattern of the other promoter. The level of expression of a promoter can be determined by measuring the ‘steady state’ concentration of a standard transcribed reporter mRNA. This measurement is indirect since the concentration of the reporter mRNA is dependent not only on its synthesis rate, but also on the rate with which the mRNA is degraded. Therefore, the steady state level is the product of synthesis rates and degradation rates.

[0077] The rate of degradation can however be considered to proceed at a fixed rate when the transcribed sequences are identical, and thus this value can serve as a measure of synthesis rates. When promoters are compared in this way techniques available to those skilled in the art are hybridization S1-RNAse analysis, northern blots and competitive RT-PCR. This list of techniques in no way represents all available techniques, but rather describes commonly used procedures used to analyze transcription activity and expression levels of mRNA.

[0078] The analysis of transcription start points in practically all promoters has revealed that there is usually no single base at which transcription starts, but rather a more or less clustered set of initiation sites, each of which accounts for some start points of the mRNA. Since this distribution varies from promoter to promoter the sequences of the reporter mRNA in each of the populations would differ from each other. Since each mRNA species is more or less prone to degradation, no single degradation rate can be expected for different reporter mRNAs. It has been shown for various eukaryotic promoter sequences that the sequence surrounding the initiation site (‘initiator’) plays an important role in determining the level of RNA expression directed by that specific promoter. This includes also part of the transcribed sequences. The direct fusion of promoter to reporter sequences would therefore lead to suboptimal levels of transcription.

[0079] A commonly used procedure to analyze expression patterns and levels is through determination of the ‘steady state’ level of protein accumulation in a cell. Commonly used candidates for the reporter gene, known to those skilled in the art are β-glucuronidase (GUS), chloramphenicol acetyl transferase (CAT) and proteins with fluorescent properties, such as green fluorescent protein (GFP) from Aequora victoria. In principle, however, many more proteins are suitable for this purpose, provided the protein does not interfere with essential plant functions. For quantification and determination of localization a number of tools are suited. Detection systems can readily be created or are available which are based on, e.g., immunochemical, enzymatic, fluorescent detection and quantification. Protein levels can be determined in plant tissue extracts or in intact tissue using in situ analysis of protein expression.

[0080] Generally, individual transformed lines with one chimeric promoter reporter construct will vary in their levels of expression of the reporter gene. Also frequently observed is the phenomenon that such transformants do not express any detectable product (RNA or protein). The variability in expression is commonly ascribed to ‘position effects’, although the molecular mechanisms underlying this inactivity are usually not clear.

[0081] “Overexpression” refers to the level of expression in transgenic cells or organisms that exceeds levels of expression in normal or untransformed (nontransgenic) cells or organisms.

[0082] “Antisense inhibition” refers to the production of antisense RNA transcripts capable of suppressing the expression of protein from an endogenous gene or a transgene.

[0083] “Gene silencing” refers to homology-dependent suppression of viral genes, transgenes, or endogenous nuclear genes. Gene silencing may be transcriptional, when the suppression is due to decreased transcription of the affected genes, or post-transcriptional, when the suppression is due to increased turnover (degradation) of RNA species homologous to the affected genes (English et al., Plant Cell, 8:179, 1996). Gene silencing includes virus-induced gene silencing (Ruiz et al., Plant Cell, 10:937, 1998).

[0084] The terms “heterologous DNA sequence,” “exogenous DNA segment” or “heterologous nucleic acid,” as used herein, each refer to a sequence that originates from a source foreign to the particular host cell or, if from the same source, is modified from its original form. Thus, a heterologous gene in a host cell includes a gene that is endogenous to the particular host cell but has been modified through, for example, the use of DNA shuffling. The terms also include non-naturally occurring multiple copies of a naturally occurring DNA sequence. Thus, the terms refer to a DNA segment that is foreign or heterologous to the cell, or homologous to the cell but in a position within the host cell nucleic acid in which the element is not ordinarily found. Exogenous DNA segments are expressed to yield exogenous polypeptides. A “homologous” DNA sequence is a DNA sequence that is naturally associated with a host cell into which it is introduced.

[0085] “Homologous to” in the context of nucleotide sequence identity refers to the similarity between the nucleotide sequence of two nucleic acid molecules or between the amino acid sequences of two protein molecules. As used herein, “homology” and “homologous” refer to an evaluation of the similarity between two sequences based on measurements of sequence identity adjusted for variables including gaps, insertions, frame shifts, conservative substitutions, and sequencing errors, as described below. Two nucleotide sequences or polypeptides are the to be “identical” if the sequence of nucleotides or amino acid residues, respectively, in the two sequences is the same when aligned for maximum correspondence as described below. The term “complementary to” is used herein to mean that the sequence can form a Watson-Crick base pair with a reference polynucleotide sequence. Complementary sequences can include nucleotides, such as inosine, that neither disrupt Watson-Crick base pairing nor contribute to the pairing. A “reverse complement” of a sequence corresponds to the complementary sequence, but in the opposite orientation of bases from 5′ to 3′, or to the complement of the primary sequence, if the primary sequence is in a reverse orientation of bases from 5′ to 3′.

[0086] Homology is evaluated using any of the variety of sequence comparison algorithms and programs known in the art. Such algorithms and programs include, but are by no means limited to, TBLASTN, BLASTP, FASTA, TFASTA, and CLUSTALW (Pearson and Lipman, Proc Natl Acad Sci (USA) 85:2444 (1988); Altschul et al., J Mol Biol 215:403 (1990)). In a particularly preferred embodiment, protein and nucleic acid sequence homologies are evaluated using the Basic Local Alignment Search Tool (“BLAST”) which is well known in the art (Karlin and Altschul, Proc Natl Acad Sci USA 87:2264 (1990); Altschul et al. (1990) supra, Altschul et al., Nucleic Acids Res 25:3389 (1997)). In particular, five specific BLAST programs are used to perform the following task:

[0087] (1) BLASTP and BLAST3 compare an amino acid query sequence against a protein sequence database;

[0088] (2) BLASTN compares a nucleotide query sequence against a nucleotide sequence database;

[0089] (3) BLASTX compares the six-frame conceptual translation products of a query nucleotide sequence (both strands) against a protein sequence database;

[0090] (4) TBLASTN compares a query protein sequence against a nucleotide sequence database translated in all six reading frames (both strands); and

[0091] (5) TBLASTX compares the six-frame translations of a nucleotide query sequence against the six-frame translations of a nucleotide sequence database.

[0092] The BLAST programs identify homologous sequences by identifying similar segments, which are referred to herein as “high-scoring segment pairs,” between a query amino or nucleic acid sequence and a test sequence which is preferably obtained from a protein or nucleic acid sequence database. High-scoring segment pairs are preferably identified (aligned) by means of a scoring matrix selected from the many scoring matrices known in the art. Preferably, the scoring matrix used is the BLOSUM62 matrix (Gonnet et al., Science 256:1443 (1992); Henikoff and Henikoff, Proteins 17:49 (1993)). Likewise, the PAM or PAM250 matrices may also be used (Schwartz and Dayhoff, In Atlas of Protein Sequence and Structure, Dayhoff, ed., Natl. Biomed. Res. Found., pp. 353-358 (1978)). The BLAST programs evaluate the statistical significance of all high-scoring segment pairs identified, and preferably selects those segments which satisfy a user-specified threshold of significance, such as a user-specified percent homology. Preferably, the statistical significance of a high-scoring segment pair is evaluated using the statistical significance formula of Karlin (Karlin and Altschul (1990) supra).

[0093] Percentage of sequence identity can be determined from alignments performed using algorithms known in the art. Alignment of nucleotide or polypeptide sequences for comparison may be conducted by the local homology algorithm of Smith and Waterman (Add APL Math 2:482 (1981)), by the homology alignment algorithm of Needleman and Wunsch (J Mol Biol 48:443 (1970)), by the search for similarity method of Pearson and Lipman (Proc Natl Acad Sci USA 85:2444 (1988)), by computerized implementations of these algorithms (GAP, BESTFIT, BLAST, PASTA, and TFASTA in the Wisconsin Genetics Software Package, Genetics Computer Group), or by inspection. When two sequences have been identified for comparison, GAP and BESTFIT are preferably employed to determine their optimal alignment. Typically, the default values of 5.00 for gap weight and 0.30 for gap weight length are used. In a preferred embodiment, percenty identity is determined using the GAP program for global alignment using default parameters, using the version of GAP found in the GCG package (Wisconsin Package Version 10.1, Genetics Computer Group, 575 Science Dr., Madison, Wis.).

[0094] Percentage of sequence identity is determined by comparing two optimally aligned sequences over a comparison window, wherein the portion of the sequence in the comparison window may include additions or deletions, including for example gaps or overhangs, as compared to the reference sequence (which does not include additions or deletions) for optimal alignment of the two sequences. The percentage is calculated by determining the number of positions at which the identical nucleotide base or amino acid residue occurs in both sequences to yield the number of matched positions, dividing the number of matched positions by the total number of positions in the window of comparison and multiplying the result by 100 to yield the percentage of sequence identity.

[0095] In a broad sense, the term “substantially similar”, when used herein with respect to a nucleotide sequence, means a nucleotide sequence corresponding to a reference nucleotide sequence, wherein the corresponding sequence encodes a polypeptide having substantially the same structure as the polypeptide encoded by the reference nucleotide sequence. Desirably, the substantially similar nucleotide sequence encodes the polypeptide encoded by the reference nucleotide sequence. Preferably, “substantially similar” refers to nucleotide sequences having at least 50% sequence identity, preferably at least 60%, 70%, 80% or 85%, more preferably at least 90% or 95%, and even more preferably, at least 96%, 97% or 99% sequence identity compared to a reference sequence containing nucleotide sequences of Table I, that encode a protein having at least 50% identity, more preferably at least 85% identity, yet still more preferably at least 90% identity to a region of sequence of a BIOPATH protein and/or an FPD, wherein the protein sequence comparisons are conducted using GAP analysis as described below. Also, “substantially similar” preferably also refers to nucleotide sequences having at least 50% identity, more preferably at least 80% identity, still more preferably 95% identity, yet still more preferably at least 99% identity, to a region of nucleotide sequence encoding a BIOPATH protein and/or an FPD, wherein the nucleotide sequence comparisons are conducted using GAP analysis as described herein. The term “substantially similar” is specifically intended to include nucleotide sequences wherein the sequence has been modified to optimize expression in particular cells.

[0096] A polynucleotide including a nucleotide sequence “substantially similar” to the reference nucleotide sequence preferably hybridizes to a polynucleotide including the reference nucleotide sequence in 7% sodium dodecyl sulfate (SDS), 0.5 M NaPO₄, 1 mM EDTA at 50° C. with washing in 2×SSC, 0.1% SDS at 50° C., more desirably in 7% sodium dodecyl sulfate (SDS), 0.5 M NaPO₄, 1 mM EDTA at 50° C. with washing in 1×SSC, 0.1% SDS at 50° C., more desirably still in 7% sodium dodecyl sulfate (SDS), 0.5 M NaPO₄, 1 mM EDTA at 50° C. with washing in 0.5×SSC, 0.1% SDS at 50° C., preferably in 7% sodium dodecyl sulfate (SDS), 0.5 M NaPO₄, 1 mM EDTA at 50° C. with washing in 0.1×SSC, 0.1% SDS at 50° C., more preferably in 7% sodium dodecyl sulfate (SDS), 0.5 M NaPO₄, 1 mM EDTA at 50° C. with washing in 0.1×SSC, 0.1% SDS at 65° C.

[0097] The term “substantially similar”, when used herein with respect to a protein or polypeptide, means a protein or polypeptide corresponding to a reference protein, wherein the protein has substantially the same structure and function as the reference protein, where only changes in amino acids sequence that do not materially affect the polypeptide function occur. When used for a protein or an amino acid sequence the percentage of identity between the substantially similar and the reference protein or amino acid sequence desirably is preferably at least 30%, more preferably at least 40%, 50%, 60%, 70%, 80%, 85%, or 90%, still more preferably at least 95%, still more preferably at least 99% with every individual number falling within this range of at least 30% to at least 99% also being part of the invention, using default GAP analysis parameters with the University of Wisconsin GCG (version 10), SEQWEB application of GAP, based on the algorithm of Needleman and Wunsch (1970), supra. As used herein the term “polypeptide of the present invention,” or any similar term refers to an amino acid sequence encoded by a DNA molecule including a nucleotide sequence substantially similar to an AC sequence. Homologs of BIOPATH protein and/or FPDs include amino acid sequences that are at least 30% identical to BIOPATH protein and/or FPD sequences found in searchable databases, as measured using the parameters described above.

[0098] “Target gene” refers to a gene on the replicon that expresses the desired target coding sequence, functional RNA, or protein. The target gene is not essential for replicon replication. Additionally, target genes may comprise native non-viral genes inserted into a non-native organism, or chimeric genes, and will be under the control of suitable regulatory sequences. Thus, the regulatory sequences in the target gene may come from any source, including the virus. Target genes may include coding sequences that are either heterologous or homologous to the genes of a particular plant to be transformed. However, target genes do not include native viral genes. Typical target genes include, but are not limited to genes encoding a structural protein, a seed storage protein, a protein that conveys herbicide resistance, and a protein that conveys insect resistance. Proteins encoded by target genes are known as “foreign proteins”. The expression of a target gene in a plant will typically produce an altered plant trait.

[0099] The term “altered plant trait” means any phenotypic or genotypic change in a transgenic plant relative to the wild-type or non-transgenic plant host.

[0100] “Chromosomally-integrated” refers to the integration of a foreign gene or DNA construct into the host DNA by covalent bonds. Where genes are not “chromosomally integrated” they may be “transiently expressed.” Transient expression of a gene refers to the expression of a gene that is not integrated into the host chromosome but functions independently, either as part of an autonomously replicating plasmid or expression cassette, for example, or as part of another biological system such as a virus.

[0101] The term “transformation” refers to the transfer of a nucleic acid fragment into the genome, including the plastid or mitochondrial genome, of a host cell, resulting in genetically stable inheritance. Host cells containing the transformed nucleic acid fragments are referred to as “transgenic” cells, and organisms comprising transgenic cells are referred to as “transgenic organisms”. Examples of methods of transformation of plants and plant cells include Agrobacterium-mediated transformation (De Blaere et al., Meth. Enzymol., 143:277, 1987) and particle bombardment technology (Klein et al., Nature, 327:70, 1987; U.S. Pat. No. 4,945,050). Whole plants may be regenerated from transgenic cells by methods well known to the skilled artisan (see, for example, Fromm et al., Bio/Technology, 8:833, 1990).

[0102] “Transformed,” “transgenic,” and “recombinant” refer to a host organism such as a bacterium or a plant into which a heterologous nucleic acid molecule has been introduced. The nucleic acid molecule can be stably integrated into the genome generally known in the art and are disclosed in Sambrook et al., Molecular Cloning, 2^{nd} ed., Cold Spring Harbor Laboratory Press, 1989. See also Innis et al., PCR Protocols, Academic Press, 1995 and Gelfand, PCR Strategies, Academic Press, 1995; and Innis and Gelfand, PCR Methods Manual, Academic Press, 1999. Known methods of PCR include, but are not limited to, methods using paired primers, nested primers, single specific primers, degenerate primers, gene-specific primers, vector-specific primers, partially mismatched primers, and the like. For example, “transformed,” “transformant,” and “transgenic” plants or calli have been through the transformation process and contain a foreign gene integrated into their chromosome. The term “untransformed” refers to normal plants that have not been through the transformation process.

[0103] “Transiently transformed” refers to cells in which transgenes and foreign DNA have been introduced (for example, by such methods as Agrobacterium-mediated transformation or biolistic bombardment), but not selected for stable maintenance.

[0104] “Stably transformed” refers to cells that have been selected and regenerated on a selection media following transformation.

[0105] “Transient expression” refers to expression in cells in which a virus or a transgene is introduced by viral infection or by such methods as Agrobacterium-mediated transformation, electroporation, or biolistic bombardment, but not selected for its stable maintenance.

[0106] “Genetically stable” and “heritable” refer to chromosomally-integrated genetic elements that are stably maintained in the plant and stably inherited by progeny through successive generations.

[0107] “Primary transformant” and “T0 generation” refer to transgenic plants that are of the same genetic generation as the tissue which is initially transformed (i.e., not having gone through meiosis and fertilization since transformation).

[0108] “Secondary transformants” and the “T1, T2, T3, etc. generations” refer to transgenic plants derived from primary transformants through one or more mciotic and fertilization cycles. They may be derived by self-fertilization of primary or secondary transformants or crosses of primary or secondary transformants with other transformed or untransformed plants.

[0109] “Wild-type” refers to a virus or organism found in nature without any known mutation.

[0110] “Genome” refers to the complete genetic material of an organism. The term “nucleic acid” refers to deoxyribonucleotides or ribonucleotides and polymers thereof in either single- or double-stranded form, composed of monomers (nucleotides) containing a sugar, phosphate and a base which is either a purine or pyrimidine. Unless specifically limited, the term encompasses nucleic acids containing known analogs of natural nucleotides which have similar binding properties as the reference nucleic acid and are metabolized in a manner similar to naturally occurring nucleotides. Unless otherwise indicated, a particular nucleic acid sequence also implicitly encompasses conservatively modified variants thereof (e.g., degenerate codon substitutions) and complementary sequences as well as the sequence explicitly indicated. Specifically, degenerate codon substitutions may be achieved by generating sequences in which the third position of one or more selected (or all) codons is substituted with mixed-base and/or deoxyinosine residues (Batzer et al., Nuc. Acids Res., 19:5081, 1991; Ohtsuka et al., J. Biol. Chem., 260:2605, 1985; Rossolini et al. Mol. Cell. Probes, 8:91, 1994). A “nucleic acid fragment” is a fraction of a given nucleic acid molecule. In higher plants, deoxyribonucleic acid (DNA) is the genetic material while ribonucleic acid (RNA) is involved in the transfer of information contained within DNA into proteins. The term “nucleotide sequence” refers to a polymer of DNA or RNA which can be single- or double-stranded, optionally containing synthetic, non-natural or altered nucleotide bases capable of incorporation into DNA or RNA polymers. The terms “nucleic acid” or “nucleic acid sequence” may also be used interchangeably with gene, cDNA, DNA and RNA encoded by a gene.

[0111] The invention encompasses isolated or substantially purified nucleic acid or protein compositions. In the context of the present invention, an “isolated” or “purified” DNA molecule or an “isolated” or “purified” polypeptide is a DNA molecule or polypeptide that, by the hand of man, exists apart from its native environment and is therefore not a product of nature. An isolated DNA molecule or polypeptide may exist in a purified form or may exist in a non-native environment such as, for example, a transgenic host cell. For example, an “isolated” or “purified” nucleic acid molecule or protein, or biologically active portion thereof, is substantially free of other cellular material, or culture medium when produced by recombinant techniques, or substantially free of chemical precursors or other chemicals when chemically synthesized. Preferably, an “isolated” nucleic acid is free of sequences (preferably protein encoding sequences) that naturally flank the nucleic acid (i.e., sequences located at the 5′ and 3′ ends of the nucleic acid) in the genomic DNA of the organism from which the nucleic acid is derived. For example, in various embodiments, the isolated nucleic acid molecule can contain less than about 5 kb, 4 kb, 3 kb, 2 kb, 1 kb, 0.5 kb, or 0.1 kb of nucleotide sequences that naturally flank the nucleic acid molecule in genomic DNA of the cell from which the nucleic acid is derived. A protein that is substantially free of cellular material includes preparations of protein or polypeptide having less than about 30%, 20%, 10%, 5%, (by dry weight) of contaminating protein. When the protein of the invention, or biologically active portion thereof, is recombinantly produced, preferably culture medium represents less than about 30%, 20%, 10%, or 5% (by dry weight) of chemical precursors or non-protein of interest chemicals.

[0112] The nucleotide sequences of the invention include both the naturally occurring sequences as well as mutant (variant) forms. Such variants will continue to possess the desired activity, i.e., either promoter activity or the activity of the product encoded by the open reading frame of the non-variant nucleotide sequence.

[0113] Thus, by “variants” is intended substantially similar sequences. For nucleotide sequences comprising an open reading frame, variants include those sequences that, because of the degeneracy of the genetic code, encode the identical amino acid sequence of the native protein. Naturally occurring allelic variants such as these can be identified with the use of well-known molecular biology techniques, as, for example, with polymerase chain reaction (PCR) and hybridization techniques. Variant nucleotide sequences also include synthetically derived nucleotide sequences, such as those generated, for example, by using site-directed mutagenesis and for open reading frames, encode the native protein, as well as those that encode a polypeptide having amino acid substitutions relative to the native protein. Generally, nucleotide sequence variants of the invention will have at least 40, 50, 60, to 70%, e.g., preferably 71%, 72%, 73%, 74%, 75%, 76%, 77%, 78%, to 79%, generally at least 80%, e.g., 81%-84%, at least 85%, e.g., 86%, 87%, 88%, 89%, 90%, 91%, 92%, 93%, 94%, 95%, 96%, 97%, to 98% and 99% nucleotide sequence identity to the native (wild type or endogenous) nucleotide sequence.

[0114] “Conservatively modified variations” of a particular nucleic acid sequence refers to those nucleic acid sequences that encode identical or essentially identical amino acid sequences, or where the nucleic acid sequence does not encode an amino acid sequence, to essentially identical sequences. Because of the degeneracy of the genetic code, a large number of functionally identical nucleic acids encode any given polypeptide. For instance the codons CGT, CGC, CGA, CGG, AGA, and AGG all encode the amino acid arginine. Thus, at every position where an arginine is specified by a codon, the codon can be altered to any of the corresponding codons described without altering the encoded protein. Such nucleic acid variations are “silent variations” which are one species of “conservatively modified variations.” Every nucleic acid sequence described herein which encodes a polypeptide also describes every possible silent variation, except where otherwise noted. One of skill will recognize that each codon in a nucleic acid (except ATG, which is ordinarily the only codon for methionine) can be modified to yield a functionally identical molecule by standard techniques. Accordingly, each “silent variation” of a nucleic acid which encodes a polypeptide is implicit in each described sequence.

[0115] The nucleic acid molecules of the invention can be “optimized” for enhanced expression in plants of interest. See, for example, EPA 035472; WO 91/16432; Perlak et al., Proc. Natl. Acad. Sci. USA, 88:3324: 1991; and Murray et al., Nuc. Acids. Res., 17:477, 1989. In this manner, the open reading frames in genes or gene fragments can be synthesized utilizing plant-preferred codons. See, for example, Campbell and Gowri, Plant Physiol., 92:1, 1990 for a discussion of host-preferred codon usage. Thus, the nucleotide sequences can be optimized for expression in any plant. It is recognized that all or any part of the gene sequence may be optimized or synthetic. That is, synthetic or partially optimized sequences may also be used. Variant nucleotide sequences and proteins also encompass sequences and protein derived from a mutagenic and recombinogenic procedure such as DNA shuffling. With such a procedure, one or more different coding sequences can be manipulated to create a new polypeptide possessing the desired properties. In this manner, libraries of recombinant polynucleotides are generated from a population of related sequence polynucleotides comprising sequence regions that have substantial sequence identity and can be homologously recombined in vitro or in vivo. Strategies for such DNA shuffling are known in the art. See, for example, Stemmer, Nature, 370:389, 1994; Stemmer, Proc. Natl. Acad. Sci. USA, 91:10747, 1994; Crameri et al., Nature Biotech., 15:436, 1997; Moore et al., J. Mol. Biol., 272:336, 1997; Zhang et al., Proc. Natl. Acad. Sci. USA, 94:4504, 1997; Crameri et al., Nature, 391:288, 1998; and U.S. Pat. Nos. 5,605,793 and 5,837,458.

[0116] By “variant” polypeptide is intended a polypeptide derived from the native protein by deletion (so-called truncation) or addition of one or more amino acids to the N-terminal and/or C-terminal end of the native protein; deletion or addition of one or more amino acids at one or more sites in the native protein; or substitution of one or more amino acids at one or more sites in the native protein. Such variants may result from, for example, genetic polymorphism or from human manipulation. Methods for such manipulations are generally known in the art.

[0117] Thus, the polypeptides may be altered in various ways including amino acid substitutions, deletions, truncations, and insertions. Methods for such manipulations are generally known in the art. For example, amino acid sequence variants of the polypeptides can be prepared by mutations in the DNA. Methods for mutagenesis and nucleotide sequence alterations are well known in the art. See, for example, Kunkel, Proc. Natl. Acad. Sci. USA, 82:488, 1985; Kunkel et al., Methods Enzymol., 154:367, 1987; U.S. Pat. No. 4,873,192; Walker and Gaastra, Techniques in Molecular Biology, MacMillan Publishing, 1983 and the references cited therein. Guidance as to appropriate amino acid substitutions that do not affect biological activity of the protein of interest may be found in the model of Dayhoff et al. (Atlas of Protein Sequence and Structure, Natl. Biomed. Res. Found., 1978). Conservative substitutions, such as exchanging one amino acid with another having similar properties, are preferred.

[0118] Individual substitutions deletions or additions that alter, add or delete a single amino acid or a small percentage of amino acids (typically less than 5%, more typically less than 1%) in an encoded sequence are “conservatively modified variations,” where the alterations result in the substitution of an amino acid with a chemically similar amino acid. Conservative substitution tables providing functionally similar amino acids are well known in the art. The following five groups each contain amino acids that are conservative substitutions for one another: Aliphatic: Glycine (G), Alanine (A), Valine (V), Leucine (L), Isoleucine (I); Aromatic: Phenylalanine (F), Tyrosine (Y), Tryptophan (W); Sulfur-containing: Methionine (M), Cysteine (C); Basic: Arginine I, Lysine (K), Histidine (H); Acidic: Aspartic acid (D), Glutamic acid (E), Asparagine (N), Glutamine (O). See also, Creighton, 1984. In addition, individual substitutions, deletions or additions which alter, add or delete a single amino acid or a small percentage of amino acids in an encoded sequence are also “conservatively modified variations.”

[0119] “Expression cassette” as used herein means a DNA sequence capable of directing expression of a particular nucleotide sequence in an appropriate host cell, comprising a promoter operably linked to the nucleotide sequence of interest which is operably linked to termination signals. It also typically comprises sequences required for proper translation of the nucleotide sequence. The coding region usually codes for a protein of interest but may also code for a functional RNA of interest, for example antisense RNA or a nontranslated RNA, in the sense or antisense direction. The expression cassette comprising the nucleotide sequence of interest may be chimeric, meaning that at least one of its components is heterologous with respect to at least one of its other components. The expression cassette may also be one which is naturally occurring but has been obtained in a recombinant form useful for heterologous expression. The expression of the nucleotide sequence in the expression cassette may be under the control of a constitutive promoter or of an inducible promoter which initiates transcription only when the host cell is exposed to some particular external stimulus. In the case of a multicellular organism, the promoter can also be specific to a particular tissue or organ or stage of development.

[0120] “Vector” is defined to include, inter alia, any plasmid, cosmid, phage or Agrobacterium binary vector in double or single stranded linear or circular form which may or may not be self transmissible or mobilizable, and which can transform prokaryotic or eukaryotic host either by integration into the cellular genome or exist extrachromosomally (e.g. autonomous replicating plasmid with an origin of replication).

[0121] Specifically included are shuttle vectors by which is meant a DNA vehicle capable, naturally or by design, of replication in two different host organisms, which may be selected from actinomycetes and related species, bacteria and eukaryotic (e.g. higher plant, mammalian, yeast or fungal cells).

[0122] Preferably the nucleic acid in the vector is under the control of, and operably linked to, an appropriate promoter or other regulatory elements for transcription in a host cell such as a microbial, e.g. bacterial, or plant cell. The vector may be a bi-functional expression vector which functions in multiple hosts. In the case of genomic DNA, this may contain its own promoter or other regulatory elements and in the case of cDNA this may be under the control of an appropriate promoter or other regulatory elements for expression in the host cell.

[0123] “Cloning vectors” typically contain one or a small number of restriction endonuclease recognition sites at which foreign DNA sequences can be inserted in a determinable fashion without loss of essential biological function of the vector, as well as a marker gene that is suitable for use in the identification and selection of cells transformed with the cloning vector. Marker genes typically include genes that provide tetracycline resistance, hygromycin resistance or ampicillin resistance.

[0124] A “transgenic plant” is a plant having one or more plant cells that contain an expression vector.

[0125] “Plant tissue” includes differentiated and undifferentiated tissues or plants, including but not limited to roots, stems, shoots, leaves, pollen, seeds, tumor tissue and various forms of cells and culture such as single cells, protoplast, embryos, and callus tissue. The plant tissue may be in plants or in organ, tissue or cell culture.

[0126] The following terms are used to describe the sequence relationships between two or more nucleic acids or polynucleotides: (a) “reference sequence”, (b) “comparison window”, (c) “sequence identity”, (d) “percentage of sequence identity”, and (e) “substantial identity”.

[0127] (a) As used herein, “reference sequence” is a defined sequence used as a basis for sequence comparison. A reference sequence may be a subset or the entirety of a specified sequence; for example, as a segment of a full length cDNA or gene sequence, or the complete cDNA or gene sequence.

[0128] (b) As used herein, “comparison window” makes reference to a contiguous and specified segment of a polynucleotide sequence, wherein the polynucleotide sequence in the comparison window may comprise additions or deletions (i.e., gaps) compared to the reference sequence (which does not comprise additions or deletions) for optimal alignment of the two sequences. Generally, the comparison window is at least 20 contiguous nucleotides in length, and optionally can be 30, 40, 50, 100, or longer. Those of skill in the art understand that to avoid a high similarity to a reference sequence due to inclusion of gaps in the polynucleotide sequence a gap penalty is typically introduced and is subtracted from the number of matches.

[0129] Methods of alignment of sequences for comparison are well known in the art. Thus, the determination of percent identity between any two sequences can be accomplished using a mathematical algorithm. Preferred, non-limiting examples of such mathematical algorithms are the algorithm of Myers and Miller, CABIOS, 4:11, 1988; the local homology algorithm of Smith et al. Adv. Appl. Math., 2:482, 1981; the homology alignment algorithm of Needleman and Wunsch J. Mol. Biol., 48:443, 1970; the search-for-similarity-method of Pearson and Lipman, Proc. Natl. Acad. Sci. USA, 85:2444, 1988; the algorithm of Karlin and Altschul, Proc. Natl. Acad. Sci. USA, 87:2264, 1990, modified as in Karlin and Altschul, Proc. Natl. Acad. Sci. USA, 90:5873, 1993.

[0130] Computer implementations of these mathematical algorithms can be utilized for comparison of sequences to determine sequence identity. Such implementations include, but are not limited to: CLUSTAL in the PC/Gene program (available from Intelligenetics, Mountain View, Calif.); the ALIGN program (Version 2.0) and GAP, BESTFIT, BLAST, FASTA, and TFASTA in the Wisconsin Genetics Software Package, Version 8 (available from Genetics Computer Group (GCG), 575 Science Drive, Madison, Wis., USA). Alignments using these programs can be performed using the default parameters. The CLUSTAL program is well described by Higgins et al. Gene, 73:237 1988; Higgins et al. CABIOS, 5:151, 1989; Corpet et al. Nuc. Acids Res., 16:10881, 1988; Huang et al., CABIOS, 8:155, 1992; and Pearson et al. Meth. Mol. Biol., 24:307, 1994. The ALIGN program is based on the algorithm of Myers and Miller, supra. The BLAST programs of Altschul et al., J. Mol. Biol., 215:403, 1990, are based on the algorithm of Karlin and Altschul supra.

[0131] Software for performing BLAST analyses is publicly available through the National Center for Biotechnology Information (http://www.ncbi.nlm.nih.gov/). This algorithm involves first identifying high scoring sequence pairs (HSPs) by identifying short words of length W in the query sequence, which either match or satisfy some positive-valued threshold score T when aligned with a word of the same length in a database sequence. T is referred to as the neighborhood word score threshold (Altschul et al., J. Mol. Biol., 215:403, 1990). These initial neighborhood word hits act as seeds for initiating searches to find longer HSPs containing them. The word hits are then extended in both directions along each sequence for as far as the cumulative alignment score can be increased. Cumulative scores are calculated using, for nucleotide sequences, the parameters M (reward score for a pair of matching residues; always >0) and N (penalty score for mismatching residues; always <0). For amino acid sequences, a scoring matrix is used to calculate the cumulative score. Extension of the word hits in each direction are halted when the cumulative alignment score falls off by the quantity X from its maximum achieved value, the cumulative score goes to zero or below due to the accumulation of one or more negative-scoring residue alignments, or the end of either sequence is reached.

[0132] In addition to calculating percent sequence identity, the BLAST algorithm also performs a statistical analysis of the similarity between two sequences (see, e.g., Karlin & Altschul (Proc. Natl. Acad. Sci. USA, 90:5873, 1993). One measure of similarity provided by the BLAST algorithm is the smallest sum probability (P(N)), which provides an indication of the probability by which a match between two nucleotide or amino acid sequences would occur by chance. For example, a test nucleic acid sequence is considered similar to a reference sequence if the smallest sum probability in a comparison of the test nucleic acid sequence to the reference nucleic acid sequence is less than about 0.1, more preferably less than about 0.01, and most preferably less than about 0.001.

[0133] To obtain gapped alignments for comparison purposes, Gapped BLAST (in BLAST 2.0) can be utilized as described in Altschul et al., Nuc. Acids Res., 25:3389, 1997. Alternatively, PSI-BLAST (in BLAST 2.0) can be used to perform an iterated search that detects distant relationships between molecules. See Altschul et al., supra. When utilizing BLAST, Gapped BLAST, PSI-BLAST, the default parameters of the respective programs (e.g. BLASTN for nucleotide sequences, BLASTX for proteins) can be used. The BLASTN program (for nucleotide sequences) uses as defaults a wordlength (W) of 11, an expectation (E) of 10, a cutoff of 100, M=5, N=-4, and a comparison of both strands. For amino acid sequences, the BLASTP program uses as defaults a wordlength (W) of 3, an expectation (E) of 10, and the BLOSUM62 scoring matrix (see Henikoff & Henikoff, Proc. Natl. Acad. Sci. USA, 89:10915, 1989). See http://www.ncbi.nlm.nih.gov. Alignment may also be performed manually by inspection.

[0134] For purposes of the present invention, comparison of nucleotide sequences for determination of percent sequence identity to the sequences disclosed herein is preferably made using the BlastN program (version 1.4.7 or later) with its default parameters or any equivalent program. By “equivalent program” is intended any sequence comparison program that, for any two sequences in question, generates an alignment having identical nucleotide or amino acid residue matches and an identical percent sequence identity when compared to the corresponding alignment generated by the preferred program.

[0135] (c) As used herein, “sequence identity” or “identity” in the context of two nucleic acid or polypeptide sequences makes reference to the residues in the two sequences that are the same when aligned for maximum correspondence over a specified comparison window. When percentage of sequence identity is used in reference to proteins it is recognized that residue positions which are not identical often differ by conservative amino acid substitutions, where amino acid residues are substituted for other amino acid residues with similar chemical properties (e.g., charge or hydrophobicity) and therefore do not change the functional properties of the molecule. When sequences differ in conservative substitutions, the percent sequence identity may be adjusted upwards to correct for the conservative nature of the substitution. Sequences that differ by such conservative substitutions are said to have “sequence similarity” or “similarity.” Means for making this adjustment are well known to those of skill in the art. Typically this involves scoring a conservative substitution as a partial rather than a full mismatch, thereby increasing the percentage sequence identity. Thus, for example, where an identical amino acid is given a score of 1 and a non-conservative substitution is given a score of zero, a conservative substitution is given a score between zero and 1. The scoring of conservative substitutions is calculated, e.g., as implemented in the program PC/GENE (Intelligenetics, Mountain View, Calif.).

[0136] (d) As used herein, “percentage of sequence identity” means the value determined by comparing two optimally aligned sequences over a comparison window, wherein the portion of the polynucleotide sequence in the comparison window may comprise additions or deletions (i.e., gaps) as compared to the reference sequence (which does not comprise additions or deletions) for optimal alignment of the two sequences. The percentage is calculated by determining the number of positions at which the identical nucleic acid base or amino acid residue occurs in both sequences to yield the number of matched positions, dividing the number of matched positions by the total number of positions in the window of comparison, and multiplying the result by 100 to yield the percentage of sequence identity.

[0137] (e)(i) The term “substantial identity” of polynucleotide sequences means that a polynucleotide comprises a sequence that has at least 70%, 71%, 72%, 73%, 74%, 75%, 76%, 77%, 78%, or 79%, preferably at least 80%, 81%, 82%, 83%, 84%, 85%, 86%, 87%, 88%, or 89%, more preferably at least 90%, 91%, 92%, 93%, or 94%, and most preferably at least 95%, 96%, 97%, 98%, or 99% sequence identity, compared to a reference sequence using one of the alignment programs described using standard parameters. One of skill in the art will recognize that these values can be appropriately adjusted to determine corresponding identity of proteins encoded by two nucleotide sequences by taking into account codon degeneracy, amino acid similarity, reading frame positioning, and the like. Substantial identity of amino acid sequences for these purposes normally means sequence identity of at least 70%, more preferably at least 80%, 90%, and most preferably at least 95%.

[0138] Another indication that nucleotide sequences are substantially identical is if two molecules hybridize to each other under stringent conditions (see below). Generally, stringent conditions are selected to be about 5° C. lower than the thermal melting point (Tₘ) for the specific sequence at a defined ionic strength and pH. However, stringent conditions encompass temperatures in the range of about 1° C. to about 20° C., depending upon the desired degree of stringency as otherwise qualified herein. Nucleic acids that do not hybridize to each other under stringent conditions are still substantially identical if the polypeptides they encode are substantially identical. This may occur, e.g., when a copy of a nucleic acid is created using the maximum codon degeneracy permitted by the genetic code. One indication that two nucleic acid sequences are substantially identical is when the polypeptide encoded by the first nucleic acid is immunologically cross reactive with the polypeptide encoded by the second nucleic acid.

[0139] (e)(ii) The term “substantial identity” in the context of a peptide indicates that a peptide comprises a sequence with at least 70%, 71%, 72%, 73%, 74%, 75%, 76%, 77%, 78%, or 79%, preferably 80%, 81%, 82%, 83%, 84%, 85%, 86%, 87%, 88%, or 89%, more preferably at least 90%, 91%, 92%, 93%, or 94%, or even more preferably, 95%, 96%, 97%, 98% or 99%, sequence identity to the reference sequence over a specified comparison window. Preferably, optimal alignment is conducted using the homology alignment algorithm of Needleman and Wunsch (J. Mol. Biol., 48:443, 1970). An indication that two peptide sequences are substantially identical is that one peptide is immunologically reactive with antibodies raised against the second peptide. Thus, a peptide is substantially identical to a second peptide, for example, where the two peptides differ only by a conservative substitution.

[0140] For sequence comparison, typically one sequence acts as a reference sequence to which test sequences are compared. When using a sequence comparison algorithm, test and reference sequences are input into a computer, subsequence coordinates are designated if necessary, and sequence algorithm program parameters are designated. The sequence comparison algorithm then calculates the percent sequence identity for the test sequence(s) relative to the reference sequence, based on the designated program parameters.

[0141] As noted above, another indication that two nucleic acid sequences are substantially identical is that the two molecules hybridize to each other under stringent conditions. The phrase “hybridizing specifically to” refers to the binding, duplexing, or hybridizing of a molecule only to a particular nucleotide sequence under stringent conditions when that sequence is present in a complex mixture (e.g., total cellular) DNA or RNA. “Bind(s) substantially” refers to complementary hybridization between a probe nucleic acid and a target nucleic acid and embraces minor mismatches that can be accommodated by reducing the stringency of the hybridization media to achieve the desired detection of the target nucleic acid sequence.

[0142] “Stringent hybridization conditions” and “stringent hybridization wash conditions” in the context of nucleic acid hybridization experiments such as Southern and Northern hybridization are sequence dependent, and are different under different environmental parameters. The Tm is the temperature (under defined ionic strength and pH) at which 50% of the target sequence hybridizes to a perfectly matched probe. Specificity is typically the function of post-hybridization washes, the critical factors being the ionic strength and temperature of the final wash solution. For DNA-DNA hybrids, the Tₘ can be approximated from the equation of Meinkoth and Wahl, Anal. Biochem., 138:267, 1984; Tₘ 81.5° C.+16.6 (log M)+0.41 (%GC)−0.61 (% form)−500/L; where M is the molarity of monovalent cations, %GC is the percentage of guanosine and cytosine nucleotides in the DNA, % form is the percentage of formamide in the hybridization solution, and L is the length of the hybrid in base pairs. Tₘ is reduced by about 1° C. for each 1% of mismatching; thus, Tm, hybridization, and/or wash conditions can be adjusted to hybridize to sequences of the desired identity. For example, if sequences with >90% identity are sought, the Tm can be decreased 10° C. Generally, stringent conditions are selected to be about 5° C. lower than the thermal melting point for the specific sequence and its complement at a defined ionic strength and pH. However, severely stringent conditions can utilize a hybridization and/or wash at 1, 2, 3, or 4° C. lower than the thermal melting point; moderately stringent conditions can utilize a hybridization and/or wash at 6, 7, 8, 9, or 10° C. lower than the thermal melting point; low stringency conditions can utilize a hybridization and/or wash at 11, 12, 13, 14, 15, or 20° C. lower than the thermal melting point. Using the equation, hybridization and wash compositions, and desired T, those of ordinary skill will understand that variations in the stringency of hybridization and/or wash solutions are inherently described. If the desired degree of mismatching results in a Tₘ of less than 45° C. (aqueous solution) or 32° C. (formamide solution), it is preferred to increase the SSC concentration so that a higher temperature can be used. An extensive guide to the hybridization of nucleic acids is found in Tijssen, Laboratory Techniques in Biochemistry and Molecular Biology-Hybridization with Nucleic Acid Probes, part I, Chap 2, Elsevier, 1993. Generally, highly stringent hybridization and wash conditions are selected to be about 5° C. lower than the thermal melting point Tₘ for the specific sequence at a defined ionic strength and pH.

[0143] An example of highly stringent wash conditions is 0.15 M NaCl at 72° C. for about 15 minutes. An example of stringent wash conditions is a 0.2×SSC wash at 65° C. for 15 minutes (see, Sambrook, infra, for a description of SSC buffer). Often, a high stringency wash is preceded by a low stringency wash to remove background probe signal. An example medium stringency wash for a duplex of, e.g., more than 100 nucleotides, is 1×SSC at 45° C. for 15 minutes. An example low stringency wash for a duplex of, e.g., more than 100 nucleotides, is 4-6×SSC at 40° C. for 15 minutes. For short probes (e.g., about 10 to 50 nucleotides), stringent conditions typically involve salt concentrations of less than about 1.5 M, more preferably about 0.01 to 1.0 M, Na ion concentration (or other salts) at pH 7.0 to 8.3, and the temperature is typically at least about 30° C. and at least about 60° C. for long robes (e.g., >50 nucleotides). Stringent conditions may also be achieved with the addition of destabilizing agents such as formamide. In general, a signal to noise ratio of 2× (or higher) than that observed for an unrelated probe in the particular hybridization assay indicates detection of a specific hybridization. Nucleic acids that do not hybridize to each other under stringent conditions are still substantially identical if the proteins that they encode are substantially identical. This occurs, e.g., when a copy of a nucleic acid is created using the maximum codon degeneracy permitted by the genetic code.

[0144] Very stringent conditions are selected to be equal to the Tₘ for a particular probe. An example of stringent conditions for hybridization of complementary nucleic acids which have more than 100 complementary residues on a filter in a Southern or Northern blot is 50% formamide, e.g., hybridization in 50% formamide, 1 M NaCl, 1% SDS at 37° C., and a wash in 0.1×SSC at 60 to 65° C. Exemplary low stringency conditions include hybridization with a buffer solution of 30 to 35% formamide, 1 M NaCl, 1% SDS (sodium dodecyl sulphate) at 37° C., and a wash in 1× to 2×SSC (20×SSC=3.0 M NaCl/0.3 M trisodium citrate) at 50 to 55° C. Exemplary moderate stringency conditions include hybridization in 40 to 45% formamide, 1.0 M NaCl, 1% SDS at 37° C., and a wash in 0.5×to 1×SSC at 55 to 60° C.

[0145] The following are examples of sets of hybridization/wash conditions that may be used to clone orthologous nucleotide sequences that are substantially identical to reference nucleotide sequences of the present invention: a reference nucleotide sequence preferably hybridizes to the reference nucleotide sequence in 7% sodium dodecyl sulfate (SDS), 0.5 M NaPO₄, 1 mM EDTA at 50° C. with washing in 2×SSC, 0.1% SDS at 50° C., more desirably in 7% sodium dodecyl sulfate (SDS), 0.5 M NaPO₄, 1 mM EDTA at 50° C. with washing in 1×SSC, 0.1% SDS at 50° C., more desirably still in 7% sodium dodecyl sulfate (SDS), 0.5 M NaPO₄, 1 mM EDTA at 50° C. with washing in 0.5×SSC, 0.1% SDS at 50° C., preferably in 7% sodium dodecyl sulfate (SDS), 0.5 M NaPO₄, 1 mM EDTA at 50° C. with washing in 0.1×SSC, 0.1% SDS at 50° C., more preferably in 7% sodium dodecyl sulfate (SDS), 0.5 M NaPO₄, 1 mM EDTA at 50° C. with washing in O. 1×SSC, 0.1% SDS at 65° C.

[0146] “DNA shuffling” is a method to introduce mutations or rearrangements, preferably randomly, in a DNA molecule or to generate exchanges of DNA sequences between two or more DNA molecules, preferably randomly. The DNA molecule resulting from DNA shuffling is a shuffled DNA molecule that is a non-naturally occurring DNA molecule derived from at least one template DNA molecule. The shuffled DNA preferably encodes a variant polypeptide modified with respect to the polypeptide encoded by the template DNA, and may have an altered biological activity with respect to the polypeptide encoded by the template DNA.

[0147] “Recombinant DNA molecule’ is a combination of DNA sequences that are joined together using recombinant DNA technology and procedures used to join together DNA sequences as described, for example, in Sambrook et al., Molecular Cloning, 2^{nd} ed., Cold Spring Harbor Laboratory Press, 1989.

[0148] The word “plant” refers to any plant, particularly to seed plant, and “plant cell” is a structural and physiological unit of the plant, which comprises a cell wall but may also refer to a protoplast. The plant cell may be in form of an isolated single cell or a cultured cell, or as a part of higher organized unit such as, for example, a plant tissue, or a plant organ.

[0149] “Significant increase” is an increase that is larger than the margin of error inherent in the measurement technique, preferably an increase by about 2-fold or greater.

[0150] “Significantly less” means that the decrease is larger than the margin of error inherent in the measurement technique, preferably a decrease by about 2-fold or greater.

[0151] Within the scope of the present invention a set of genes is provided which comprises nucleic acid molecules that are involved in or asscociated with isoprenoid metabolism in plants, but especially in cereal plants such as rice, wheat, banana, maize, barley, etc.

[0152] According to one embodiment, the present invention is directed to a nucleic acid molecule comprising a nucleotide sequence isolated or obtained from any plant which encodes a polypeptide that has at least 70% amino acid sequence identity to a polypeptide encoded by a gene comprising any one of SEQ ID NOs provided in the Sequence Listing.

[0153] The genes within this subgroup are useful tools for generating plants, but especially cereal plants, which exhibit modified compositional characteristics leading to improved nutritional and pharmacological properties.

[0154] Exemplary representatives of such genes and polypeptides are those selected from the group consisting of SEQ ID NO. 1-414 including homologs and orthologs thereof, for example SEQ ID NO. 415-661, or the complements thereof.

[0155] In one embodiment, the present invention thus relates to an isolated nucleic acid molecule comprising a nucleotide sequence encoding a polypeptide, which is involved in or associated with isoprenoid metabolism and the use of said molecule for modifying the nutritional and pharmacological composition and thus the quality of the plant.

[0156] In particular, the subsets of nucleic acid molecules provided herein, which comprise genes that are involved in isoprenoid biosynthesis is a valuable tool box from which an appropriate nucleic acid molecule can be chosen to modify the quantity and/or quality of the nutritional and pharmacological constituents of the plant, respectively.

[0157] This can be achieved by introducing and overexpressing at least one nucleic acid molecule from the various subsets of genes provided herein in the plant, but preferentially in the approproate tissues of the plant such as, for example, the plant seed, leaf, stem, flower, fruit, etc, and, within the cells of said tissue within the appropriate cellular compartment such as, for example, plastids, mitochondria, ER, the cytosol, etc. In the alternative, the expression level of the corresponding endogenous gene can be reduced by methods known in the art including anti-sense and dsRNAi techniques.

[0158] A representative group of sequences which can be used for that purpose is provided in the Sequence Listing as SEQ ID NOs: 1-414 The majority of the genes within this group encode protein products that are directly involved in or associated with the major pathways of isoprenoid metabolism: plastididal biosynthetic pathways; cytosolic and mitochondrial biosynthetic pathways; pathways leading to monoterpenes and sesquiterpenes; pathways leading to protein phenylation.

[0159] In one embodiment, the present invention identifies and provides a subset of genes that is involved in plastididal biosynthetic pathways. By modifying the expression level of at least one nucleic acid molecule from this subgroup in a plant, but preferably in the approproate tissues of the plant such as, for example, the green tissue parts of the plant, and even more preferably in the plant leaf or stem, it is possible to modify the nutritional or pharmacological composition of the plant accordingly.

[0160] Thus, in one aspect, the present invention relates to an isolated nucleic acid molecule comprising a nucleotide sequence encoding a polypeptide the activity of which is involved in or associated with the biosynthesis of isoprenoids in the plant plastids, which nucleotide sequence is substantially similar to a sequence encoding a polypeptide as given in any one of the SEQ ID NOs of Table 1.

[0161] In particular, the invention relates to an isolated nucleic acid molecule comprising a nucleotide sequence encoding a polypeptide the activity of which is involved in or associated with the biosynthesis of isoprenoids in plant plastids, but especially the plastids of a cereal plant such as rice, wheat, banana, barley, maize, etc, and which is substantially similar, and preferably has at least between 70%, and 99% amino acid sequence identity to at least one polypeptide as given in any one of the SEQ ID NOs of Table 1, with any individual number within this range of between 70% and 99% also being part of the invention.

[0162] The invention further relates to an isolated nucleic acid molecule comprising a nucleotide sequence encoding a polypeptide the activity of which is involved in or associated with the biosynthesis of isoprenoids in the plant plastids, but especially the plastids of a cereal plant such as rice, wheat, banana, barley, maize, etc, and which is immunologically reactive with antibodies raised against a polypeptide as given in any one of the SEQ ID NOs of Table 1.

[0163] More particularly, the invention relates to an isolated nucleic acid molecule comprising a nucleotide sequence

[0164] a) as given in in any one of the SEQ ID NOs of Table 1;

[0165] b) having substantial similarity to (a);

[0166] c) having at least 15 nucleotides capable of hybridizing to (a) or the complement thereof, perferably under stringent, highly stringent or very highly stringent conditions;

[0167] d) having at least 15 nucleotides and capable of hybridizing to a nucleic acid comprising 50 to 200 or more consecutive nucleotides of a nucleotide sequence as given in any one of the SEQ ID NOs of Table 1. or the complement thereof, perferably under stringent, highly stringent or very highly stringent conditions;

[0168] e) complementary to (a), (b) or (c); and

[0169] f) which is a reverse complement of (a), (b) or (c).

[0170] By providing these genes it is now possible to regulate the expression levels of the encoded protein products in the plant, but especially a cereal plant such as rice, wheat, banana, barley, maize, etc, by applying methods known in the art including overexpressing or down-regulating the nucleic acid molecule in a plant, thereby modifying the isoprenoid content of the plant.

[0171] In one specific embodiment, the present invention relates to a subset of genes that encode a protein that exhibits an enzymatic activity that is involved in or associated with the mevalonate-independent biosynsethis of plastidial isoprenoids.

[0172] The mevalonate-independent pathway is responsible for the biosynthesis of plastidial isoprenoids. Evidence has emerged over the last few years that isopentenyl diphosphate, the central intermediate of isoprenoid biosynthesis, originates from pyruvate and D-glyceraldehyde-3-phosphate via a new mevalonate-independent pathway in several eubacteria (Rohmer, M., et al., Biochem. J. 295, 517-524, 1993; Broers, S. T. J. (1994) Ph.D. Thesis, Eidgenossische Technische Hochschule, Zuirich, Switzerland; Rohmer, M., et al., J. Am. Chem. Soc. 118, 2564-2566, 1996), algae (Schwender, J., et al., Biochem. J. 316, 73-80, 1996), and plant plastids (Schwarz, M. K. (1994) Ph.D. Thesis, Eidgenossische Technische Hochschule, Zurich, Switzerland; Lichtenthaler, H. K., et al., FFBS Lett. 400, 271-274, 1997).

[0173] The enzymes responsible for the biosynthesis of IPP (isopentenyl diphosphate) and DMAPP (dimethylallyl alcohol) via the mevalonate-independent pathway in plants are localized to plastids. For the first enzyme, 1-deoxy-D-xylulose 5-phosphate synthase (DXPS), the A. thaliana genome contains three copies, for one of which functional data have been obtained (Estevez et al., J. Biol. Chem., 22901, 2001). The subsequent steps are catalyzed by 1-deoxy-D-xylulose 5-phosphate reductoisomerase (DXR), 2-C-methyl-D-erythritol 4-phosphate cytidyltransferase (MCT), 4-(cytidine 5′-diphospho)-2-C-methyl-D-erythritol kinase (CMK) and 2-C-methyl-D-erythritol 2,4-cyclodiphosphate synthase (MECPS). Functional data are available for A. thaliana orthologues of DXR (Schwender et al., FEBS Lett., 455:140, 1999) and MCT (Rohdich et al., Proc. Natl. Acad. Sci. USA, 97:6451, 2000), whereas functional data for plant CMKs are obtained only for the tomato enzyme (Rohdich et al., Proc. Natl. Acad. Sci. USA, 97:8251, 2000), and MECPS has been functionally characerized from a non-plant source. Two additional open reading frames from E. coli, annotated as lytB and gepE, have been characterized recently to encode enzyme products capable of generating IPP and DMAPP from 2-C-methyl-D-erythritol 2,4-cyclodiphosphate (Hintz et al., FEBS Lett., 509:317, 2001; Hecht et al., Proc. Natl. Acad. Sci. USA, 98:14837, 2001; Rohdich et al., Proc. Natl. Acad. Sci. USA, 99:20925, 2002). Genes homologous to lytB and gcpE occur as single copies in A. thaliana.

[0174] In one specific embodiment, the invention relates to an isolated nucleic acid molecule comprising a nucleotide sequence encoding a polypeptide the activity of which is involved in or associated with the biosynthesis of isopentenyl diphosphate (IPP) and dimethylallyl alcohol (DMAPP) in plant plastids, which nucleotide sequence is substantially similar to a sequence encoding a polypeptide as given in the SEQ ID NOs identified in Table 1 such as SEQ ID NOs: 100, 114, 154, 162, 268 and 414.

[0175] In particular, the invention relates to an isolated nucleic acid molecule comprising a nucleotide sequence encoding a polypeptide the activity of which is involved in or associated with the biosynthesis of IPP and DMAPP in plant plastids, and which is substantially similar, and preferably has at least between 70%, and 99% amino acid sequence identity to at least one polypeptide of SEQ ID NOs given in table 1 such as SEQ ID NOs: 100, 114, 154, 162, 268 and 414, with any individual number within this range of between 70% and 99% also being part of the invention.

[0176] The invention further relates to an isolated nucleic acid molecule comprising a nucleotide sequence encoding a polypeptide the activity of which is involved in or associated with the biosynthesis of IPP and DMAPP in plant plastids, and which is immunologically reactive with antibodies raised against a polypeptide as given in the SEQ ID NOs of table 1 such as SEQ ID NOs: 100, 114, 154, 162, 268 and 414.

[0177] More particularly, the invention relates to an isolated nucleic acid molecule comprising a nucleotide sequence

[0178] a) as given in any one of SEQ ID NOs of table 1 such as SEQ ID NOs:

[0179] 99, 113, 153, 161, 267 and 413;

[0180] b) having substantial similarity to (a);

[0181] c) having at least 15 nucleotides and capable of hybridizing to (a) or the complement thereof under stringent, highly stringent or very highly stringent conditions;

[0182] d) having at least 15 nucleotides and capable of hybridizing to a nucleic acid comprising 50 to 200 or more consecutive nucleotides of a nucleotide sequence given in (a) or the complement thereof under stringent, highly stringent or very highly stringent conditions;

[0183] e) complementary to (a), (b) or (c); and

[0184] f) which is a reverse complement of (a), (b) or (c).

[0185] By providing these genes it is now possible to regulate the expression levels of the encoded protein products in the plant by applying methods known in the art including overexpressing or down-regulating the nucleic acid molecule in a plant, thereby modifying the isoprenoid content of the plant.

[0186] An up-regulation of genes and encoded enzymes of the mevalonate-independent pathway is expected to increase the accumulation of the end-products.

[0187] In addition, the over-expression of DXR resulted in an increased production of isoprenoid essential oil components in peppermint (Mahmoud and Croteau, Proc. Nat. Acad. Sci. USA 98: 8915, 2001).

[0188] Arabidopsis T-DNA knock-out lines for DXPS, DXR and MCT show an albino phenotype (Budziszewski et al., Genetics, 159: 1765, 2001), thus indicating their potential as targets for herbicides.

[0189] In marigold, the homolog to the DXP synthase is shown to produce a deep red when in the presence of lycopene.

[0190] A regulatory role of DXPS is also reported for carotenoid biosynthesis during tomato fruit development (Lois et al., Plant J., 22: 503, 2000).

[0191] A gene (or other nucleic acid molecule) encoding any one of the proteins given in SEQ ID NOs: 100, 114, 154, 162, 268 and 414, but especially a gene encoding 1-deoxy-D-xylulose-5-phosphate reductoisomerase such as that given in SEQ ID NO: 268 may be incorporated into any organism (intact plant, animal, microbe, etc.), or cell culture derived therefrom, but especially into a plant, for example, a cereal plant including rice, wheat, barley, banana, maize, etc. The enzyme 1-deoxy-D-xylulose-5-phosphate reductoisomerase catalyzes the first committed step in the conversion of 1-deoxy-D-xylulose-5-phosphate to isopentenyl diphosphate which, in turn, is converted to a variety of molecules including, for example, carotenoids, and the prenyl side chains of chlorophyll, plastoquinone and tocopherols. Thus, a 1-deoxy-D-xylulose-5-phosphate reductoisomerase gene (or other nucleic acid molecule) may be introduced into any organism for a variety of purposes including, but not limited to: production of 1-deoxy-D-xylulose-5-phosphate reductoisomerase, or its product 2-C-methyl-D-erythritol-4-phosphate; enhancement of chlorophyll production by increasing the synthesis of the phytol side-chain; enhancement of production of terpenoids, phytoalexins, toxins, and deterrent compounds to improve defense against pathogens, insects and other herbivores; enhance the production of monoterpene flavor and aroma compounds in essential oil plants, fruits and vegetables to improve the flavor and aroma profiles, or improve the yield of flavor and aroma compounds extracted from plants, to prepare synthetic intermediates in plants and microbes for industrial uses, such as the synthesis of adhesives, inks and polymers; to enhance the production of natural pigments, such as carotenoids, in plants, and to improve the yield of natural pigments extracted from plants for medicinal or culinary uses, to enhance the yield in plants of compounds having anti-cancer or other nutraceutical properties, such as vitamin A and vitamin E; and to produce 2C-methyl-D-erythritol phosphate as an enzymatic or chemical intermediate. While the nucleic acid molecules of the present invention can be introduced into any organism, the nucleic acid molecules of the present invention will preferably be introduced into a plant species, but especially into a cereal plant including rice, wheat, barley, banana, maize, etc.

[0192] A further subset of genes provided herein comprises genes that encode polypeptides with an activity that is involved in or associated with the biosynthesis of short-chain prenyltransferases of the plastid.

[0193] The invention thus also relates to an isolated nucleic acid molecule comprising a nucleotide sequence encoding a polypeptide the enzymatic activity of which is involved in or associated with the biosynthesis of short-chain prenyltransferases of the plastid and, which nucleic acid is substantially similar to a nucleic acid encoding a polypeptide as given in any one of the SEQ ID NOs of Table 1 such as SEQ ID NOs: 12, 48, 84, 126, 136, 130, 236, 244, 266, 300, 346, 372, 410 and 412.

[0194] More specifically, the invention relates to an isolated nucleic acid molecule comprising a nucleotide sequence encoding a polypeptide the enzymatic activity of which involved in or associated with the biosynthesis of short-chain prenyltransferases of the plastid and has at least between 70%, and 99% amino acid sequence identity to at least one polypeptide as given in any one of the SEQ ID NOs of Table 1 such as SEQ ID NOs: 12, 48, 84, 126, 136, 130, 236, 244, 266, 300, 346, 372 410 and 412, with any individual number within this range of between 70% and 99% also being part of the invention.

[0195] The invention further relates to an isolated nucleic acid molecule comprising a nucleotide sequence encoding a polypeptide the enzymatic activity of which is involved in or associated with the biosynthesis of short-chain prenyltransferases of the plastid and which is immunologically reactive with antibodies raised against a polypeptide as given in any one of the SEQ ID NOs of Table 1 such as SEQ ID NOs: 12, 48, 84, 126, 136, 130, 236, 244, 266, 300, 346, 372, 410 and 412.

[0196] More particularly, the invention relates to an isolated nucleic acid molecule comprising a nucleotide sequence

[0197] a) as given in any one of the SEQ ID NOs of Table 1 such as SEQ ID NOs: 11, 47, 83, 125, 135, 229, 235, 243, 265, 299, 345, 371, 409 and 411;

[0198] b) having substantial similarity to (a);

[0199] c) having at least 15 nucletoides and capable of hybridizing to (a) or the complement thereof under stringent, highly stringent or very highly stringent conditions;

[0200] d) having at least 15 nucleotides and capable of hybridizing to a nucleic acid comprising 50 to 200 or more consecutive nucleotides of a nucleotide sequence (a) or the complement thereof under stringent, highly stringent, or very highly stringent conditions;

[0201] e) complementary to (a), (b) or (c); and

[0202] f) which is a reverse complement of (a), (b) or (c).

[0203] As part of the plastidial stage 2 reactions, A. thaliana genes encoding two isoenzymes of isopentenyl diphosphate isomerase and a geranyl diphosphate synthase (GPPS; single copy gene in A. thaliana genome), have been characterized (Campbell et al., Plant Mol. Biol., 36:323, 1997; Bouvier et al., Plant J., 24:241, 2000). Geranylgeranyl diphosphate synthase (GGPPS) is encoded by a multigene family with 12 members. In A. thaliana; for five members of this gene family functional data have been obtained (Okada et al., Plant Physiol., 122:1045, 2000), and two isoenzymes of these have been shown to occur in plastids. Based on the sequence characteristics of the remaining 7 members of the GGPPS gene family, all encoded proteins contain a plastidial targeting sequence and should thus be localized to plastids.

[0204] A further subset of genes that is provided as part of the invention comprises genes that are involved in the biosynthesis of gibberellins.

[0205] Gibberellins are classified on the basis of structure as well as function. All gibberellins are derived from the ent-gibberellane skeleton. All gibberellins are acidic compounds and are therefore also called gibberellic acids (GA) with a different subscript to distinguish between them. GA₃ has historically been called gibberellic acid but the term is also often used in describing all gibberellins. GA's are widespread and so far ubiquitous in both flowering (angiosperms) and non-flowering (gymnosperms) plants as well as ferns. They have also been isolated from lower plants such as mosses and algae, at least two fungal species and most recently from two bacterial species.

[0206] Active gibberellins show many physiological effects, each depending on the type of gibberellin present as well as the species of plant. Some of the physiological processes stimulated by gibberellins are outlined below (Davies, 1995; Mauseth, 1991; Raven, 1992; Salisburv and Ross, 1992).

[0207] 1. Stimulate stem elongation by stimulating cell division and elongation.

[0208] 2. Stimulates bolting/flowering in response to long days.

[0209] 3. Breaks seed dormancy in some plants which require stratification or light to induce germination.

[0210] 4. Stimulates enzyme production (a-amylase) in germinating cereal grains for mobilization of seed reserves.

[0211] 5. Induces maleness in dioecious flowers (sex expression).

[0212] 6. Can cause parthenocarpic (seedless) fruit development.

[0213] 7. Can delay senescence in leaves and citrus fruits.

[0214] Gibberellins are tetracyclic diterpenes with a role as hormones controling stem elongation and affecting reproductive processes. Two diterpene synthases are encoded in the A. thaliana genome which code for the two plastidial entry enzymes into the gibberellin biosynthetic pathway, copalyl diphosphate synthase (Sun and Kamiya, Plant Cell, 6:1509, 1994) and ent-kaurene synthase (Yamaguchi et al., Plant Physiol., 116:1271, 1998). The gibberellin end-products are generated by a series of extraplastidial oxidative modifications, starting with the multifunctional cytochrome P450 monooxygenases ent-kaurene oxidase (Helliwell et al., Plant Physiol., 119:507, 1999; single gene in A. thaliana) and ent-kaurenoic acid oxidase (Helliwell et al., Proc. Natl. Acad. Sci. USA, 98:2065, 2001; 2 isogenes), which are localized to the endoplasmatic reticulum. Further modifications are catalyzed by multifunctional oxoglutarate-dependent enzymes, and include gibberellin 20-oxidase (Xu et al., Proc. Natl. Acad. Sci. USA, 92:6640, 1995; Phillips et al., Plant Physiol., 108:1049, 1995; 5 isogenes in A. thaliana) and gibberellin 3β-oxidase (Williams et al., Plant Physiol., 117:559, 1998), which are localized in the cytosol. Gibberellin deactivation reactions are initiated by gibberellin 2-oxidase (Thomas et al., Proc. Natl. Acad. Sci. USA, 96:4698, 1999; 3 isogenes in A. thaliana), another multifunctional oxoglutarate-dependent dioxygenase with cytosolic localization. Further catabolic reactions are undefined at this time.

[0215] By providing these genes it is now possible to regulate the expression levels of the encoded protein products in the plant by applying methods known in the art including overexpressing or down-regulating the nucleic acid molecule in a plant, thereby modifying the giberrelin content of the plant.

[0216] Over-expression of gibberellin biosynthetic genes may result in an increased seed production in nice in deepwater areas.

[0217] Deepwater rice is a subsistence crop for ˜100 Mio people in areas of Southeast Asia. An important factor for yield is the submergence-induced rapid internodal elongation of deepwater rice stems, which is regulated, at least in part, by gibberellins (Kende et al., Plant Physiol., 118: 1105, 1998). By overexpressing one or more of the genes that are involved or associated with gibberllin biosynthesis such as those given in Table 1 and in particular SEQ ID NOs: 25, 67, 75, 79, 97, 107, 141, 155, 173, 193, 203, 205, 223, 225, 253, 259, 261, 291, 297, 349, 359, 375, 377, and 399, gibberllin levels can be manipulated such as to increase the speed of internodal elongation and thus yield in rice.

[0218] Thus, in one aspect, the present invention relates to an isolated nucleic acid molecule comprising a nucleotide sequence encoding a polypeptide the activity of which is involved in or associated with the biosynthesis of gibberellins in the plant plastids, which nucleotide sequence is substantially similar to a sequence encoding a polypeptide as given in any one of the SEQ ID NOs of Table 1 such as SEQ ID NOs: 26, 68, 76, 80, 98, 108, 142, 156, 174, 194, 204, 206, 224, 226, 254, 260, 262, 292, 298, 350, 360, 376, 378, and 400.

[0219] In particular, the invention relates to an isolated nucleic acid molecule comprising a nucleotide sequence encoding a polypeptide the activity of which is involved in or associated with the biosynthesis of gibberellins in the plant plastids, and which is substantially similar, and preferably has at least between 70%, and 99% amino acid sequence identity to at least one polypeptide as given in any one of the SEQ ID NOs of Table 1 such as SEQ ID NOs: 26, 68, 76, 80, 98, 108, 142, 156, 174, 194, 204, 206, 224, 226, 254, 260, 262, 292, 298, 350, 360, 376, 378, and 400, with any individual number within this range of between 70% and 99% also being part of the invention.

[0220] The invention further relates to an isolated nucleic acid molecule comprising a nucleotide sequence encoding a polypeptide the activity of which is involved in or associated with the biosynthesis of gibberellins in the plant plastids, and which is immunologically reactive with antibodies raised against a polypeptide as given in any one of the SEQ ID NOs of Table 1 such as SEQ ID NOs: 26, 68, 76, 80, 98, 108, 142, 156, 174, 194, 204, 206, 224, 226, 254, 260, 262, 292, 298, 350, 360, 376, 378, and 400.

[0221] More particularly, the invention relates to an isolated nucleic acid molecule comprising a nucleotide sequence

[0222] g) as given in in any one of the SEQ ID NOs of Table 1 such as SEQ ID NOs: 25, 67, 75, 79, 97, 107, 141, 155, 173, 193, 203, 205, 223, 225, 253, 259, 261, 291, 297, 349, 359, 375, 377, and 399;

[0223] h) having substantial similarity to (a);

[0224] i) having at least 15 nucleotides and capable of hybridizing to (a) or the complement thereof under stringent, highly stringent or very highly stringent conditions;

[0225] j) having at least 15 nucleotides and capable of hybridizing to a nucleic acid comprising 50 to 200 or more consecutive nucleotides of a nucleotide sequence of (a) or the complement thereof under stringent, highly stringent, or very highly stringent conditions;

[0226] k) complementary to (a), (b) or (c); and

[0227] l) which is a reverse complement of (a), (b) or (c).

[0228] In still another embodiment the invention discloses a subset of genes comprising genes that encode polypeptides, which are involved in or associated with the biosynthesis of carotenoids and/or abscisic acids in the plant plastid and cytosol, respectively.

[0229] Carotenoids are essential components of photosynthetic membranes and are involved in the dissipation of excess light energy during photosynthesis; thus, the enzymes involved in carotenoid biosynthesis are attractive targets for herbicides; conversely, the over-expression, in tobacco, of a phytoene desaturase gene conferred tolerance to the herbicide norflurazon (Misawa et al., Plant J., 4:833, 1993).

[0230] Carotenoids also play an important role in human nutrition (Parker, FASEB J., 10: 542, 1996; Mayne, FASEB J., 10: 690, 1996). Lycopene, beta-carotene and zeaxanthin are used as poultry and fish farming additives, as well as in foods as colorants (Klaui and Bauemfeind, Carotenoids as Colorants and Vitamin A Precursors, Academic Press, 1981).

[0231] The biosynthesis of carotenoids, which protect the photosynthetic apparatus from photooxidative damage and play a structural role in the assemby of light-harvesting complexes, is entirely localized to plastids. Phytoene synthase, which catalyzes the first commited step in this pathway, was first cloned from tomato (Bartley et al., J. Biol. Chem., 267:5036, 1992), and is encoded by a single gene in A. thaliana. Further metabolic conversions are catalyzed by phytoene desaturase (Bartley et al., Proc. Natl. Acad. Sci. USA, 88:6532, 1991) and ζ-carotene desaturase (Albrecht et al., FEBS Lett., 372:199, 1995) to yield lycopene (genes for both enzymes occur as single copies in the A. thaliana genome). In addition, phytoene desaturation also requires plastoquinone (Norris et al., Plant Cell, 7:2139, 1995) and a plastidial terminal oxidase activity (Wu et al., Plant Cell, 11:43, 1999). Lycopene is cyclized on both ends to generate either β-carotene (catalyzed by lycopene β-cyclase, Pecker et al., Plant Mol. Biol., 30:807, 1996) or α-carotene (combination of lycopene β-cyclase and lycopene ε-cyclase (Cunningham at al., Plant Cell, 8:1613, 1996)). Hydroxylation of β-carotene by β-carotene hydroxylase (Sun et al., J. Biol. Chem., 271:24349, 1996; 2 isogenes detectable in the A. thaliana genome) results in the formation of zeaxanthin. Hydroxylation of a-carotene, possibly by the action of the same β-hydroxylase and an as yet unidentified ε-hydroxylase, produces lutein, the most abundant xanthophyll in plant plastids. Zeaxanthin epoxidase, which was first cloned from tobacco (Marin et al., EMBO J, 15:2331, 1996), catalyzes the conversion of zeaxanthin to violaxanthin. A homologous sequence, represented by a single copy gene, is detectable in the A. thaliana genome. Under high light intensity, violaxanthin is converted back to zeanxanthin (violaxanthin de-epoxidase; Bugos et al., J. Biol. Chem., 273:15321, 1998), which participates in the thermal dissipation of excess absorbed light energy (xanthophyll cycle). Both violaxanthin and its allene derivative neoxanthin can be precursors for the carotenoid-derived plant hormone abscisic acid (ABA). In potato and tobacco, violaxanthin can be converted to neoxanthin by neoxanthin synthase, an enzyme with high homology to carotenoid cyclases and capsanthin/capsorubin synthase from pepper (Bouvier et al., Eur. J. Biochem, 267:6346, 2000; Al-Babili et al., FEBS Lett., 485:168, 2000). However, in A. thaliana, no additional candidate genes, besides the already characterized carotenoid cyclases, are detectable with reasonable sequence homology, indicating that a neoxanthin synthase activity may either not exist in this organism, or that it has evolved independently from a divergent enzyme, or that it uses violaxanthin as the precursor for ABA biosynthesis. Thus far, two further enzymes involved in the breakdown of xanthophylls to ABA have been cloned: genes for epoxycarotenoid cleavage enzyme (Schwartz et al., 2001) occur as a family of 7 members in the A. thaliana genome, whereas abscisic aldehyde oxidase (Seo et al., Proc. Natl. Acad. Sci. USA, 97:12908, 2000) is encoded by a single copy gene. ABA 8′-hydroxylase, a membrane-bound cytochrome P450 monooxygenase has been characterized biochemically (Krochko et al., Plant Physiol., 118:849, 1998).

[0232] In a specific embodiment, the present invention provides nucleic acid molecules such as those represented in Table 1 such as SEQ ID NOs: 27, 89, 103, 121, 205, 237, 245, 271, 275, 301, 313, 317, 383, 391, 395, 397 and 407 that encode polypeptides which exhibit an enzymatic activity that is involved in or associated with the biosynthesis of carotenoids and/or abscisic acids in the plant plastid and cytosol, respectively.

[0233] The invention thus relates to an isolated nucleic acid molecule comprising a nucleotide sequence encoding a polypeptide which exhibits an enzymatic activity that is involved in or associated with the biosynthesis of carotenoids and/or abscisic acids in the plant plastid and cytosol, respectively, which nucleotide sequence is substantially similar to a sequence encoding a polypeptide as given in any one of the SEQ ID NOs of Table 1 such as SEQ ID Nos: 28, 90, 104, 122, 206, 238, 246, 272, 276, 302, 314, 318, 384, 392, 396, 398 and 408.

[0234] More specifically, the invention relates to an isolated nucleic acid molecule comprising a nucleotide sequence encoding a polypeptide which exhibits an enzymatic activity that is involved in or associated with the biosynthesis of carotenoids and/or abscisic acids in the plant plastid and cytosol, respectively and has at least between 70%, and 99% amino acid sequence identity to at least one polypeptide as given in any one of the SEQ ID NOs of Table 1 such as SEQ ID Nos: 28, 90, 104, 122, 206, 238, 246, 272, 276, 302, 314, 318, 384, 392, 396, 398 and 408, with any individual number within this range of between 70% and 99% also being part of the invention.

[0235] The invention further relates to an isolated nucleic acid molecule comprising a nucleotide sequence encoding a polypeptide which exhibits an enzymatic activity that is involved in or associated with the biosynthesis of carotenoids and/or abscisic acids in the plant plastid and cytosol, respectively and immunologically reactive with antibodies raised against a polypeptide as given in any one of the SEQ ID NOs of Table 1 such as SEQ ID Nos: 28, 90, 104, 122, 206, 238, 246, 272, 276, 302, 314, 318, 384, 392, 396, 398 and 408.

[0236] More particularly, the invention relates to an isolated nucleic acid molecule comprising a nucleotide sequence

[0237] a) as given in any one of the SEQ ID NOs of Table 1 such as SEQ ID Nos: 27, 89, 103, 121, 205, 237, 245, 271, 275, 301, 313, 317, 383, 391, 395, 397 and 407;

[0238] b) having substantial similarity to (a);

[0239] c) having at least 15 nucelotides and capable of hybridizing to (a) or the complement thereof under stringent, highly stringenty or very highly stringent conditions;

[0240] d) having at least 15 nucleotides and capable of hybridizing to a nucleic acid comprising 50 to 200 or more consecutive nucleotides of a nucleotide sequence of (a) or the complement thereof under stringent, highly stringenty or very highly stringent conditions;

[0241] e) complementary to (a), (b) or (c); and

[0242] f) which is a reverse complement of (a), (b) or (c).

[0243] By providing these genes it is now possible to regulate the expression levels of the encoded protein products in the plant by applying methods known in the art including overexpressing or down-regulating the nucleic acid molecule in a plant, thereby modifying the carotenoid and abscisic acid content of the plant, respectively.

[0244] Over-expression of caroteinoid biosynthetic genes may result in plants producing enhanced levels of caroteinoids such as lycopene, beta-carotene and zeaxanthin and thus to plant products with enhanced nutritional value.

[0245] Abscisic acid is a key factor regulating transpiration, stress responses, germination of seeds and embryogenesis. Most effects of ABA seem to be related to water availability—it apparently acts as a signal of reduced water availability. ABA conserves water by reducing water loss, slowing growth and mediating adaptive responses. However, ABA influences most aspects of plant growth and development to some extent—partly due to interactions with other phytohormones.

[0246] By over-expressing or knocking-out one or more of the genes that are involved in or associated with abscisic acid biosynthesis it is possible to modify the level of abscisic acid in plants and hence regulation of transpiration, stress responses, germination of seeds and embryogenesis. For example, it has been shown that an over-expression of 9-cis-epoxycarotenoid dioxygenase gene, which encodes an enzyme catalyzing the first step in the breakdown of carotenoids to abscisic acid, enhances drought tolerance in tobacco (Qin and Zeevart, Plant Physiol., 2002).

[0247] In still another embodiment the invention discloses a subset of genes comprising genes that encode polypeptides, which are involved in or associated with the biosynthesis of tocopherols in the plant plastid and cytosol, respectively.

[0248] Tocopherols are essential for the prevention of photo-oxidative deterioration of biomembranes (Fryer, Plant Cell Environ., 15:381, 1992). Tocopherols, and in particular alpha-tocopherol, exhibit vitamin E activity.

[0249] A daily intake of 100 to 1000 International Units of vitamin E is acssociated with a decreased risk of cardiovascular disease and some cancers, improved immune function, and slowing of the progression of a number of degenerative human conditions (Traber and Sies, Annu. Rev. Nutr., 16:321, 1996).

[0250] Tocopherols, collectively known as vitamin E, are lipid-soluble antioxidants synthesized exclusively by photosynthetic organisms. The first committed step in tocopherol biosynthesis involves the condensation of homogentisate, which is derived from tyrosine (tyrosine aminotransferase; Lopukhina et al., Plant Physiol., 126:1678, 2001; family of 7 genes in A. thaliana genome) viap-hydroxyphenylpyruvate (HPPD synthase, Norris et al., Plant Physiol., 117:1317, 1998; single copy gene in A. thaliana), and phytyl diphosphate, which is generated from GGPP by geranylgeranyl reductase (GGR; Keller et al., Eur. J. Biochem., 251:413, 1998; single copy gene in A. thaliana). This condensation reaction is catalyzed by a membrane-bound plastid-localized homogentisate phytyltransferase (Collakova and DellaPenna, Plant Physiol., 127:1113, 2001; single copy gene in A. thaliana). Further conversion involve a C-methyltransferase and tocopherol-specific cyclase to yield γ-tocopherol. An alternative pathway from 2-methyl-6-phytylquinol via δ-tocopherol or β-tocopherol to γ-tocopherol has been proposed, but no enzymes involved in these steps have as yet been identified (Schultz et al., Physiol. Plant., 64:123, 1985). As the last step of the biosynthetic sequence, γ-tocopherol is converted to α-tocopherol by γ-tocopherol O-methyltransferase (Shintant and DellaPenna, Science, 282:2098, 1998), for which a single gene is detectable in the A. thaliana genome.

[0251] In one specific embodiment the present invention thus relates to an isolated nucleic acid molecule comprising a nucleotide sequence encoding a polypeptide which has an enzymatic activity that is involved in or associated with the biosynthesis of tocopherols in the plant plastid and cytosol, respectively, which nucleotide sequence is substantially similar to a sequence encoding a polypeptide as given in any one of the SEQ ID NOs of Table 1 such as SEQ ID Nos: 90 and 276.

[0252] In particular, the invention relates to an isolated nucleic acid molecule comprising a nucleotide sequence encoding a polypeptide which has an enzymatic activity that is involved in or associated with the biosynthesis of tocopherols in the plant plastid and cytosol, respectively, and is substantially similar, and preferably has at least between 70%, and 99% amino acid sequence identity to at least one polypeptide as given in any one of the SEQ ID NOs of Table 1 such as SEQ ID NOs: 90 and 276, with any individual number within this range of between 70% and 99% also being part of the invention.

[0253] The invention further relates to an isolated nucleic acid molecule comprising a nucleotide sequence encoding a polypeptide which has an enzymatic activity that is involved in or associated with the biosynthesis of tocopherols in the plant plastid and cytosol, respectively, and is immunologically reactive with antibodies raised against a polypeptide as given in any one of the SEQ ID NOs of Table 1 such as SEQ ID Nos: 90 and 276.

[0254] More particularly, the invention relates to an isolated nucleic acid molecule comprising a nucleotide sequence

[0255] a) as given in any one of the SEQ ID NOs of Table 1 such as SEQ ID Nos: 89 and 275;

[0256] b) having substantial similarity to (a);

[0257] c) having at least 15 nucleotides and capable of hybridizing to (a) or the complement thereof under stringent, highly stringent or very highly stringent conditions;

[0258] d) having at least 15 nucleotides and capable of hybridizing to a nucleic acid comprising 50 to 200 or more consecutive nucleotides of a nucleotide sequence of (a) or the complement thereof under stringent, highly stingent or very highly stringent conditions;

[0259] e) complementary to (a), (b) or (c); and

[0260] f) which is a reverse complement of (a), (b) or (c).

[0261] By providing these genes it is now possible to regulate the expression levels of the encoded protein products in the plant by applying methods known in the art including overexpressing or down-regulating the nucleic acid molecule in a plant, thereby modifying the tocopherol content of the plant, respectively.

[0262] As it is nearly impossible to reach the levels of vitamin E which are believed to be associated with a decreased risk of cardiovascular disease and some cancers, improved immune function, and slowing of the progression of a number of degenerative human conditions with an average Western diet, it has been proposed to use transgenic approaches (e.g. by over-expression of genes involved in tocopherol biosynthesis) to adjust the vitamin E levels in foods.

[0263] Over-expression of one or more genes that are involved in or associated with tocopherol biosynthesis such as those provided in SEQ ID NOs: 89 and 275 may result in plants producing enhanced levels of Vitamin E and thus produce plants with enhanced nutritional value. For example, gamma-Tocopherol O-methyltransferase can be used to convert oils rich in gamma-tocopherol into oils consisting mainly or exclusively of alpha-tocopherol (which has a much higher vitamin E activity).

[0264] In still another embodiment the present invention provides a further subset of nucleic acid molecules comprising genes that are involved in or associated with plastoquinone and/or phylloquinone biosynthesis in the plant plastid and cytosol, respectively.

[0265] These quinones are integral parts of the photosynthetic machinery of plants. Substituted quinones are employed as cofactors in electron transport chains of the two photosystems of plants and cyanobacteria. In photosystem II, plastoquinone-9 functions as a one-electron cofactor in the QA site and as a two-electron/two proton cofactor in the QB site. The biosynthesis involves, as in the case of tocopherols, a condensation of homogentisate with a prenyl diphosphate. The localization of enzymes responsible for the biosynthesis of the polyprenyl side chain of plastoquinone is still a matter of debate. Swiezewska et al, (J. Biol. Chem., 268:1494, 1993) have presented biochemical evidence that microsomal preparation from spinach contain polyprenyl diphosphate (solanesyl diphosphate) synthase and prenyltransferase activity for plastoquinone biosynthesis, and they have hypothesized that a specific transport and targeting system is required for the transfer of intermediates of plastoquinone biosynthesis into plastids. In contrast, using feeding experiments with isotopically labeled precursors, Lichtenthaler et al. (FEBS Lett., 400:271, 1997) and Disch et al., (Biochem. J., 15:615, 1998) have shown that the polyprenyl side chain of plastoquinone is synthesized in plastids via the mevalonate-independent pathway. The A. thaliana genome contains two predicted proteins with homology to solanesyl diphosphate synthase from Rhodobacter capsulatus (Okada et al., J. Bacteriol., 179:5992, 1997). One of these SDS-like isoenzymes apears to be, according to a TargetP analysis, localized to mitochondria (Atlg78510). For the second isogene (Atlg17050) a cytosolic localization is indicated by TargetP analysis; however, an alternative gene model for the same sequence (AAD50025) results in a gene product that is predicted to be localized to mitochondria. A plastidial SDS-like isoform has not been predicted yet. The A. thaliana genome contains a small gene family of prenyltransferases one of which has been characterized as being the tocopherol biosynthetic enzyme homogentisate phytyltransferase. A second prenyltransferase encodes chlorophyll synthetase (Gaubier et al., Mol. Gen. Genet., 249:58, 1995), whereas a third homologue is predicted, by TargetP analysis, to be localized to plastids (Table I), which is consitent with a homogentisate polyprenyltransferase for plastoquinone biosynthesis based on the isotope labeling data (Lichtenthaler et al., FEBS Lett., 400:271, 1997; Disch et al., Biochem J., 15:615, 1998). Phylloquinone, a second plastidial quinone of plants, functions as a one-electron cofactor in the Al site of photosystem I. Although the biosynthetic route to phylloquinone in plants has not been described in plants yet, the pathway is likely to be similar to the pathway of menaquinone biosynthesis in eubacteria. Menaquinone differs from phylloquinone by the presense of a partly unsaturated C-40 side chain rather than a mostly saturated, C-20 phytyl side chain. The genome database for the cyanobacterium Synechocystis, which also produces phylloquinone and not menaquinone, contains homologues for several genes that encode enzymes for menaquinone biosynthesis in E. coli, two of which, 1,4-dihydroxy-2-naphthoate (DHNA) synthase (menB) and DHNA phytyltransferase (mena) have been characterized using a mutant approach (Johnson et al., J. Biol. Chem. 275:8523, 2000). Based on a homology search, the putative A. thaliana orthologues for these genes are identified (Table I). In addition, homologues of the E. coli menaquinone biosynthetic genes O-succinylbenzoate (OSB) synthase (menC), 2-succinl-6-hydroxy-2,4-cycohexadiene-1-carboxylate (SHCHC) synthase (menD), and OSB-CoA ligase (menE) are detectable in the A. thaliana genome (Table I).

[0266] Two genes for isochorismate synthase are present in the A. thaliana genome, one of which is involved in salicylic acid biosynthesis (Wildermuth et al., Nature, 414:562, 2001), whereas the second isoenzyme could be involved in the phylloquinone biosynthetic pathway (Table I). In E. coli, the menaquinone and the ubiquinone biosynthetic pathways use the same C-methyltransferase (ubiE); however, in plants the pathway to the menaquinone analogue phylloquinone is localized to plastids whereas ubiquinone biosynthesis is restricted to mitochondria. Interestingly, the A. thaliana genome contains five genes with homology to ubiE. One ubiE homologue appears to specify an enzyme with a mitochondrial targeting sequence (candidate gene for ubiquinone biosynthesis) and a second gene encodes, based on a TargetP analysis, a plastidial isoenzyme which may be involved phylloquinone biosynthesis (Table I). The three additional copies are, based on current gene prediction, localized to the cytosolic compartment.

[0267] In one embodiment, the invention relates to an isolated nucleic acid molecule comprising a nucleotide sequence encoding a polypeptide with an enzymatic activity that is involved in or associated with plastoquinone and/or phylloquinone biosynthesis in the plant plastid and cytosol, respectively, which nucleotide sequence is substantially similar to a sequence encoding a polypeptide as given in SEQ ID NOs: 18, 30, 86, 88, 90, 208, 214, 286, 394, and 402.

[0268] In particular, the invention relates to an isolated nucleic acid molecule comprising a nucleotide sequence encoding a polypeptide with an enzymatic activity that is involved in or associated with plastoquinone and/or phylloquinone biosynthesis in the plant plastid and cytosol, respectively, and preferably has at least between 70%, and 99% amino acid sequence identity to at least one polypeptide as given in the SEQ ID NOs identified in Table 1 such as SEQ ID NOs: 18, 30, 86, 88, 90, 208, 214, 286, 394, and 402, with any individual number within this range of between 70% and 99% also being part of the invention.

[0269] The invention further relates to an isolated nucleic acid molecule comprising a nucleotide sequence encoding a polypeptide polypeptide with an enzymatic activity that is involved in or associated with plastoquinone and/or phylloquinone biosynthesis in the plant plastid and cytosol, respectively, and is immunologically reactive with antibodies raised against a polypeptide as given in the SEQ ID NOs identified in Table 1 such as SEQ ID NOs: 18, 30, 86, 88, 90, 208, 214, 286, 394, and 402.

[0270] More particularly, the invention relates to an isolated nucleic acid molecule comprising a nucleotide sequence

[0271] a) as given in the SEQ ID NOs identified in Table 1 such as SEQ ID NOs: 17, 29, 85, 87, 89, 207, 213, 285, 393, and 401;

[0272] b) having substantial similarity to (a);

[0273] c) having at least 15 nucleotides and capable of hybridizing to (a) or the complement thereof under stringent, highly stringent or very highly stringent conditions;

[0274] d) having at least 15 nucleotides and capable of hybridizing to a nucleic acid comprising 50 to 200 or more consecutive nucleotides of a nucleotide sequence of (a), or the complement thereof under stringent, highly stringent or very highly stringent conditions;

[0275] e) complementary to (a), (b) or (c); and

[0276] f) which is a reverse complement of (a), (b) or (c).

[0277] By providing these genes it is now possible to regulate the expression levels of the encoded protein products in the plant by applying methods known in the art including overexpressing or down-regulating the nucleic acid molecule in a plant, thereby modifying the plastoquinone and/or phylloquinone content of the plant, respectively.

[0278] Plastoquinones and tocopherols are essential structures for plants. Inhibitors of the biosynthesis of plastoquinones and tocopherols are therefore potential herbicides.

[0279] An over-expression of one or more genes involved in or associated with plastoquinone and phylloquinone biosynthesis such as those provided in SEQ ID NOs: 63256; 7568; 5714; 151018; and 26784 may result in an increased plant fittness under high light conditions.

[0280] One of most important and valuable activities plants are engaged in is photosynthesis, the light harvesting system of plants. Chlorophylls are light harvesting pigments present in all green photosynthetic organisms and are essential components of this light harvesting system. Its biosynthesis depends on the complex interaction of multiple enzymes.

[0281] Cyanobacteria and chloroplasts of algae and plants typically synthesize chlorophyll a and chlorophyll b for light harvesting and energy-generating charge separation. The Mg-tetrapyrrols of chlorophylls are derived from L-glutamate. Their biosynthesis starts with the conversion of L-glutamate to glutamate 1-semialdehyde, catalyzed by glutamyl-tRNA synthetase (Day et al., Biochim. Biophys. Acta, 1399:219, 1998; single copy gene in A. thaliana) and glutamyl-tRNA reductase (Kumar and Soll, Proc. Natl. Acad. Sci. USA, 89:10842, 1992; Kumar et al., Plant Mol. Biol., 30:419, 1996; 3 isogenes detectable in A. thaliana genome). For both of the subsequent enzymes, glutamate 1-semialdehyde aminotransferase, that was first cloned from barley (Grimm, Proc. Natl. Acad. Sci. USA, 87:4169, 1990), and aminolevulinate dehydratase, that was first cloned from pea (Boese et al., J. Biol. Chem., 266:17060, 1991), the A. thaliana genome contains two gene copies. Porphobilinogen deaminase catalyzes the condensation of four molecules of porphobilinogen to form 1-hydroxymethylbilane (Lim et al., Plant Mol. Biol., 26:863, 1994; single copy gene in A. thaliana). For uropophyrinogen decarboxylase, which was first cloned from tobacco and barley (Mock et al., Plant Mol. Biol., 28:245, 1995), two copies can be detected in the A. thaliana genome. Catalysis by coproporphyrinogen III oxidase (Ishikawa et al., Plant J., 27:89, 2001; single copy gene in A. thaliana) and protoporphyrinogen IX oxidase (Narita et al., Gene, 182:169, 1996; 2 isogenes inA. thaliana genome) lead to the formation of protoporphyrin IX. At this stage, the pathway branches to yield phytochromobilin, the chromophore of the plant photoreceptor phytochrome, via an iron-dependent pathway, or the chlorophylls via a Mg-dependent pathway. The synthesis of phytochromobilin requires three enzymes, ferrochelatase (Chow et al., Plant J., 15:531, 1998; two isogenes in A. thaliana genome), heme oxygenase (Muramoto et al., Plant Cell, 11:335, 1999; Davis et al., Proc. Natl. Acad. Sci. USA, 96:6541 1999; Davis et al., Plant Physiol., 126:656, 2001; 4 isogenes in A. thaliana genome), and phytochromobilin synthase (Kohchi et al., Plant Cell, 13:425, 2001; single copy gene in A. thaliana). The Mg-dependent pathway to chlorophylls starts with Mg-protoporphyrinogen IX chelatase (Papenbrock et al., Plant J., 12:981, 1997; 3 isogenes in A. thaliana genome). Subsequent reactions involve Mg-protoporphyrinogen IX methyltransferase, that was cloned from Synechocystis (Smith et al., Plant Mol. Biol., 30:1307, 1996) and has homologues in plants (single copy gene in A. thaliana), and two enzymes, Mg-protoporphyrinogen IX monomethylester cyclase and 8-vinyl reductase. The conversion to chlorophyllide a is catalyzed by protochlorophyllide oxidoreductase (Benli et al., Plant Mol. Biol., 16:615, 1991; Armstrong et al., Plant Physiol., 108:1505, 1995; Su et al., Plant Mol. Biol., 47:805, 2001), for which three copies are encoded in the A. thaliana genome. The synthesis of chlorophyll a involves the attachment of the phytyl side chain by chlorophyll synthetase (Gaubier et al., Mol. Gen. Genet., 249:58 1995; single copy gene in A. thaliana). Chlorophyll b differs from chlorophyll a in the conversion of a methyl group to a formyl side group, a reaction catalyzed by chlorophyll a oxygenase (Espineda et al., Proc. Natl. Acad. Sci. USA, 96:10507, 1999; single copy gene in A. thaliana). Senescence and subsequent death are terminal phases in the development of all organs of a plant, including leaves, stems, roots, and flowers. During senescence, one of the clearest symptoms is the loss of green color due to chlorophyll breakdown. The first step in the catabolic cascade is the conversion of chlorophyll to chlorophyllide in a reaction catalyzed by chlorophyllase (Benedetti et al., Plant Physiol., 116:1037, 1998; Tsuchiya et al., Proc. Natl. Acad. Sci. USA, 96:15362, 1999; 2 isogenes in A. thaliana). The other product of chlorophyllase action is phytol, which usually accumulates in the lipid globules of gerontoplasts in the form of esters. Mg-de-chelatase is required to remove Mg from chlorophyllide, a reaction which is followed by a ring closure catalyzed by pheophorbide a oxygenase (both genes not cloned yet). The resulting catabolite (red chlorophyll catabolite; RCC) is further metbolized by RCC reductase (Mach et al., Proc. Natl. Acad. Sci. USA, 98:771, 2001; single copy gene in A. thaliana), which catalyzes the ferredoxin-dependent reduction of a double bond in the pyrrol system of RCC to produce fluorescent chlorophyll catabolite (FCC). FCC is then exported and further metabolized in the cytosolic and vacuolar compartments to yield the nonfluorescent chlorophyll catabolites (Hortensteiner, Phytochemistry, 49:953, 1998). The regulation of chlorophyll biosynthesis is complex; thus far, the characterized mediators include light (activation of protochlorophyllide oxidoreductase; Armstrong et al., Plant Physiol, 108:1505, 1995; Su et al., Plant Mol. Biol., 47:805, 2001), heme (negative regulator of glutamyl-tRNA reductase; Pontoppidan and Kannangara, Eur. J. Biochem., 225:529, 1995) and FLU (negative regulator of several enzymes of the Mg-dependent branch of the pathway; Meskauskiene et al., Proc. Natl. Acad. Sci. USA, 98:12826, 2001).

[0282] Apart from conventional breeding and mutagenesis techniques, recombinant DNA techniques are now increasingly used in order to specifically interfere with the photosynthetic activity of plants. A prerequisite for this is that DNA sequences be provided which encode enzymes involved in the photosynthetic processes, such as those involved in cholorphyll metabolism.

[0283] The present invention now provides a subset of nucleic acid molecules that are involved in or associated with the chlorophyll biosynthesis pathway. Representative examples of those subset genes are provided in SEQ ID NOs: 31, 47, 53, 105, 117, 127, 139, 143, 149, 175, 177, 191, 199, 221, 277, 295, 307, 325, 335, 339, 355, and 363 of the Sequence Listing.

[0284] In a particular embodiment, the present invention relates to an isolated nucleic acid molecule comprising a nucleotide sequence encoding a polypeptide the enzymatic activity of which is involved in associated with chlorophyll metabolism in the plant plastid and cytosol, respectively, which nucleic acid molecule is substantially similar to a nucleic acid encoding a polypeptide as given in any one of the SEQ ID NOs of Table 1 such as SEQ ID NOs: 32, 48, 54, 106, 118, 128, 140, 144, 150, 176, 178, 192, 200, 222, 278, 296, 308, 326, 336, 340, 356, and 364.

[0285] More specifically, the invention relates to an isolated nucleic acid molecule comprising a nucleotide sequence encoding a polypeptide the enzymatic activity of which is involved in associated with chlorophyll metabolism in the plant plastid and cytosol, respectively, and which is substantially similar, and preferably has at least between 70%, and 99% amino acid sequence identity to at least one polypeptide as given in any one of the SEQ ID NOs of Table 1 such as SEQ ID NOs: 32, 48, 54, 106, 118, 128, 140, 144, 150, 176, 178, 192, 200, 222, 278, 296, 308, 326, 336, 340, 356, and 364, with any individual number within this range of between 70% and 99% also being part of the invention.

[0286] The invention further relates to an isolated nucleic acid molecule comprising a nucleotide sequence encoding a polypeptide the enzymatic activity of which is involved in associated with chlorophyll metabolism in the plant plastid and cytosol, respectively, and which is immunologically reactive with antibodies raised against a polypeptide as given in any one of the SEQ ID NOs of Table 1 such as SEQ ID NOs: 32, 48, 54, 106, 118, 128, 140, 144, 150, 176, 178, 192, 200, 222, 278, 296, 308, 326, 336, 340, 356, and 364.

[0287] More particularly, the invention relates to an isolated nucleic acid molecule comprising a nucleotide sequence

[0288] a) as given in any one of the SEQ ID NOs of Table 1 such as SEQ ID NOs: 31, 47, 53, 105, 117, 127, 139, 143, 149, 175, 177, 191, 199, 221, 277, 295, 307, 325, 335, 339, 355, and 363;

[0289] b) having substantial similarity to (a);

[0290] c) having at least 15 nucleotides and capable of hybridizing to (a) or the complement thereof under stringent, highly stringent or very highly stringent conditions;

[0291] d) having at least 15 nucleotides and capable of hybridizing to a nucleic acid comprising 50 to 200 or more consecutive nucleotides of a nucleotide sequence of (a), or the complement thereof under stringent, highly stringent or very highly stringent conditions;

[0292] e) complementary to (a), (b) or (c); and

[0293] f) which is a reverse complement of (a), (b) or (c).

[0294] By providing a subset of genes encoding polypeptides that are involved in chlorophyll metabolism it is now possible to interfere with chlorophyll metabolism to produce chlorophyll with modified physico/chemical characteristics and increased photosynthetic efficiency.

[0295] An increased production of chlorophylls, e.g. by over-expression of genes involved in the biosynthetic pathway may result in improved plant fitness.

[0296] Enzymes of the biosynthetic pathway have been used successfully as targets for hebicides. For example, protoprophyrinogen oxidase is the target enzyme for phthalimide and diphenylether herbicides (Duke et al., Am. Chem. Soc. Symp., Ser. 559:191, 1994).

[0297] In a further embodiment, the present invention provides a subset of nucleic acid molecules comprising genes encoding polypeptides the enzymatic activity of which is involved in or associated with isoprenoid biosynthesis in the cytosol and/or mitochondria.

[0298] Cytosolic and mitochondrial isoprenoids are derived from acetyl-CoA, which itself is obtained from carbon fixation of CO₂ through a sequence of glycolytic enzymes. The early steps of the biosynthetic pathway include acetoacetyl-CoA thiolase, which was cloned from radish (Vollack and Bach, Plant Physiol., 111:1097, 1996; two homologous genes are detectable in A. thaliana genome), 3-hydroxy-3-mthylglutaryl (HMG) CoA synthase (Montamat et al., Gene, 167:197, 1995; single copy gene in A. thaliana genome), and HMG-CoA reductase (Caelles et al., Plant Mol. Biol., 13:627, 1989; Enjuto et al., Proc. Natl. Acad. Sci. USA, 91:927, 1994; two gene copies exist in the A. thaliana genome) to yield mevalonate. Two successive phosphorylations, catalyzed by mevalonate kinase (Riou et al., 1994; single copy gene in A. thaliana) and phosphomevalonate kinase (a distant homologue of the yeast (Tsay and Robinson, Mol. Cell. Biol., 11:620, 1991) gene is detectable in the A. thaliana genome), and a decarboxylation (mevalonate diphosphate decarboxylase; Cordier et al., Plant Mol. Biol., 39:953, 1999; 2 isogenes in A. thaliana genome) lead to the formation of IPP. Interestingly, the A. thaliana genome does not contain obvious additional homologues to the two plastidial IPPI isoenzymes; however, a phylogenetic analysis has indicated that an alternative translation start site may allow the generation of cytosolic isoenzymes from the same genes (Cunningham and Gantt, Plant Cell Physiol., 41:119, 2000). A. thaliana contains two farnesyl diphosphate synthase (FPPS) genes, coding for one cytosolic isoenzyme (Delourme et al., Plant Mol. Biol., 26:1867, 1994; involved in phytosterol and sesquiterpene biosynthesis) and one mitochondrial isoenzyme (Cunillera et al., J. Biol. Chem., 272:15381, 1997; involved in ubiquinone biosynthesis).

[0299] In a specific embodiment the invention relates to an isolated nucleic acid molecule comprising a nucleotide sequence encoding a polypeptide the enzymatic activity of which is involved in or associated with the mevalonate pathway in the cytosol and/or mitochondria which nucleic acid molecule is substantially similar to a nucleic acid encoding a polypeptide as given in the SEQ ID NOs identified in Table 1 such as SEQ ID NOs: 112, 134, 166, 294, 316, 354, and 366.

[0300] More specifically, the invention relates to an isolated nucleic acid molecule comprising a nucleotide sequence encoding a polypeptide the enzymatic activity of which is involved in or associated with the mevalonate pathway in the cytosol and/or mitochondria, respectively, and has at least between 70%, and 99% amino acid sequence identity to at least one polypeptide as given in the SEQ ID NOs identified in Table 1 such as SEQ ID NOs: 112, 134, 166, 294, 316, 354, and 366, with any individual number within this range of between 70% and 99% also being part of the invention.

[0301] The invention further relates to an isolated nucleic acid molecule comprising a nucleotide sequence encoding a polypeptide the enzymatic activity of which is involved in or associated with the mevalonate pathway in the cytosol and/or mitochondria, respectively, and is immunologically reactive with antibodies raised against a polypeptide as given in the SEQ ID NOs identified in Table 1 such as SEQ ID NOs: 112, 134, 166, 294, 316, 354, and 366.

[0302] More particularly, the invention relates to an isolated nucleic acid molecule comprising a nucleotide sequence

[0303] a) as given given in the SEQ ID NOs identified in Table 1 such as SEQ ID NOs: 111, 133, 165, 293, 315, 353, and 365;

[0304] b) having substantial similarity to (a);

[0305] c) having at least 15 nucleotides and capable of hybridizing to (a) or the complement thereof under stringent, highly stringent or very highly stringent conditions;

[0306] d) having at least 15 nucleotides and capable of hybridizing to a nucleic acid comprising 50 to 200 or more consecutive nucleotides of nucleotide sequences given in (a) or the complement thereof under stringent, highly stringent or very highly stringent conditions;

[0307] e) complementary to (a), (b) or (c); and

[0308] f) which is a reverse complement of (a), (b) or (c).

[0309] A further subset of genes provided herein comprises genes that encode polypeptides with an activity that is involved in or associated with the biosynthesis of long-chain polyprenyl diphoshates in the cytosol.

[0310] The invention thus also relates to an isolated nucleic acid molecule comprising a nucleotide sequence encoding a polypeptide the enzymatic activity of which is involved in or associated with the biosynthesis of long-chain polyprenyl diphoshates in the cytosol and which nucleic acid is substantially similar to a nucleic acid encoding a polypeptide as given in any one of the SEQ ID NOs of table 1.

[0311] The biosynthetic sequence to dolichols, which are long-chain polyprenols required for the synthesis of glycoproteins, starts with dehydrodolichyl diphosphate synthase (Cunillera et al., FEBS Lett., 477:170, 2000). In the A. thaliana genome, three copies of this cis-prenyltransferase are detectable, two of which appear to encode cytosolic isoenzymes (ER-associated), whereas one isoenzymes, based on a TargetP analysis, appears to be localized to mitochondria. Further steps towards dolichyl-sugars are completely undefined in plants. In addition, Oh et al. (2000) have reported on a cis-prenyltransferase, homologous to undecaprenyl diphosphate synthase from eubacteria, which catalyzes the formation of polyprenyl diphosphates ranging from C100 to C130. The A. thaliana genome contains three copies for genes putatively encoding cis-prenyltransferases, thus producing cytosolic polyprenyl diphosphates the metabolic fate of which is currently unknown.

[0312] A further subset of genes provided herein comprises genes that encode polypeptides with an activity that is involved in or associated with phytosterol and brassinosteroid metabolism in the plant cytosol.

[0313] The biosynthesis of sterols, which are important in controlling membrane fluidity and are involved in plant embryogenesis, starts with the condensation of two molecules of famesyl diphosphate (squalene synthase; Nakashima et al., Proc. Natl. Acad. Sci. USA, 92:2328, 1995; 2 gene copies detectable in A. thaliana genome) and a subsequent oxidation (squalene monooxygenase; Schafer et al., Plant Mol. Biol., 39:721, 1999; 6 isogenes in A. thaliana genome). The resulting 2,3-epoxysqualene serves as a substrate for triterpene synthases which catalyze cyclization reactions that ultimately lead to, besides the typical membrane sterols, a vast array of triterpenoid compounds. A sequence relationship tree of the A. thaliana triterpenoid synthases indicates the presence of three distinct subfamilies: one family codes for cycloartenol synthase (Corey et al., Proc. Natl. Acad. Sci. USA, 90:11628, 1993; two copies in A. thaliana), a second family includes lupeol synthase-like sequences (Herrera et al., Phytochemistry, 49:1905, 1998; 4 members in A. thaliana), and the funtion of a third family, which comprises six members, has yet to be characterized (Husselstein-Muller et al., Plant Mol. Biol., 45:75, 2001). The further conversions of the lupeol and amyrin intermediates synthesized by the members of the second triterpene synthase family are unknown. The membrane sterol pathway involves methyltransferases acting on cycloartenol (sterol C24-methyltransferase 1; first cloned from soybean (Shi et al., J. Biol. Chem., 271:9384, 1996); one homologue in A. thaliana genome) and 24-methylenelophenol (sterol C24-methyltransferase 2; Husselstein et al., FEBS Lett., 381:87, 1996; Bouvier-Nave et al., Eur. J. Biochem., 246:518, 1997; 2 isogenes in A. thaliana). The substrates for demethylases include obtusifoliol (obtusifoliol C14-methyl oxidase (CYP51); Kushiro et al., Biochim. Biophys. Res. Commun., 285:98, 2001; 2 isogenes in A. thaliana), 24-methylenelophenol/citrostadienol (C4-methyl oxidase; Damet et al., FEBS Lett., 508:39, 2001; isogenes in A. thaliana) and 24-methylenecycloartenol (24-methylenecycloartenol C4-methyl oxidase; not cloned yet; two candidate genes based on sequence relatedness to CYP51 in A. thaliana genome; Table I). Isomerases are involved in the conversion of cycloeucalenol to obtusifoliol (Lovato et al., J. Biol. Chem., 275:13394, 2000) and of 4α-methylfecosterol to 24-methylenelophenol (Grebenok et al., Plant Mol. Biol., 38:807, 1998). Three sterol reductases have been cloned, comprising obtusifoliol C14-reductase (Schrick et al., Genes Dev., 14:1471 2000), sterol C7-reductase (Lecain et al., J. Biol. Chem., 271:10866, 1996) and a sterol C24-reductase (Klahre et al., Plant Cell, 10:1677, 1998). Thus far, one desaturase has been cloned (sterol C5-desaturase; Gachotte et al., Plant J., 9:391, 1996; 2 closely related genes in A. thaliana genome), with a sterol C22-desaturase, leading from β-sitosterol to stigmasterol, still undiscovered. Besides free sterols, steryl glycosides and acylated steryl glycosides are abundant in plant cell membranes. The first two enzymes involved in these conversions have been characterized as UCP-glucose:sterol glucosyltransferases (Wameke et al., Plant Mol. Biol., 35:597, 1997; two gene copies detectable in the A. thaliana genome). The biosynthetic steps leading from campesterol to the plant hormone brassinolide have been proposed, but few enzymes have been characterized. Thus far, a sterol 5α-reductase (DET2; Li et al., Science, 272:398, 1996), a C22α-hydroxylase (Choe et al., Plant Cell, 10:231, 1998) and a C23α-hydroxylase (Szekeres et al., Cell, 85:171, 1996) have been cloned. The biosynthetic sequence from campesterol to brassinolide involves 4 steps for which a catalysis by a 3β-hydroxy dehydrogenase or a 3-keto-reductase is required. Interestingly, the A. thaliana genome contains three copies of a gene with homology to 3β-hydroxysteroid dehydrogenases of animals, in which this bifunctional enzyme catalyzes multiple oxidative conversions of Δ⁵-ene-3 β-hydroxysteroids and is also able to act as a 3-keto reductase (Rogerson et al., J. Steroid Biochem. Mol. Biol., 55:481, 1995). In addition, the A. thaliana genome contains a copy for a putative 17β-hydroxysteroid dehydrogenase and 8 copies of a putative 11β-hydroxysteroid dehydrogenase, the function of which in plants has yet to be demonstrated. The closest plant homologue of the A. thaliana 11β-hydroxysteroid dehydrogenase family is a gene from Sesamum indicum that is annotated as a steroleosin (AF302806), a reductase of plant oil bodies. Steroid sulfotransferases play an important role in the modulation of the biological activity of a number of metabolites, including steroid hormones and neurotransmitters. Thus far, only one plant gene, from Brassica napus, has been cloned, and its encoded enzyme has been demonstrated to catalyze the sulfonation of a brassinosteroid, which results in the loss of biological activity (Rouleau et al., J. Biol. Chem., 274:20925 1999). The A. thaliana genome contains a family of 15 genes with homology to mamalian steroid sulfotransferases.

[0314] In one further embodiment, the invention thus relates to an isolated nucleic acid molecule comprising a nucleotide sequence encoding a polypeptide the enzymatic activity of which is involved in or associated with phytosterol and brassinosteroid metabolism in the plant cytosol, which nucleotide sequence is substantially similar to a nucleic acid sequence encoding a polypeptide as given in in the SEQ ID NOs identified in Table 1 such as SEQ ID: 4, 6, 14, 16, 22, 34, 36, 38, 46, 50, 60, 62, 66, 92, 96, 120, 124, 132, 148, 164, 170, 174, 184, 188, 196, 198, 220, 252, 270, 288, 304, 310, 312, 324, 330, 332, 334, 338, 342, 362, 368, 380, 390, and 406.

[0315] More specifically, the invention relates to an isolated nucleic acid molecule comprising a nucleotide sequence encoding a polypeptide the enzymatic activity of which is involved in or associated with phytosterol and brassinosteroid metabolism in the plant cytosol, and which has at least between 70%, and 99% amino acid sequence identity to at least one polypeptide as given in the SEQ ID NOs identified in Table 1 such as SEQ ID: 4, 6, 14, 16, 22, 34, 36, 38, 46, 50, 60, 62, 66, 92, 96, 120, 124, 132, 148, 164, 170, 174, 184, 188, 196, 198, 220, 252, 270, 288, 304, 310, 312, 324, 330, 332, 334, 338, 342, 362, 368, 380, 390, and 406, with any individual number within this range of between 70% and 99% also being part of the invention.

[0316] The invention further relates to an isolated nucleic acid molecule comprising a nucleotide sequence encoding a polypeptide the enzymatic activity of which is involved in or associated with phytosterol and brassinosteroid metabolism in the plant cytosol, and which is immunologically reactive with antibodies raised against a polypeptide as given in the SEQ ID NOs identified in Table 1 such as SEQ ID: 4, 6, 14, 16, 22, 34, 36, 38, 46, 50, 60, 62, 66, 92, 96, 120, 124, 132, 148, 164, 170, 174, 184, 188, 196, 198, 220, 252, 270, 288, 304, 310, 312, 324, 330, 332, 334, 338, 342, 362, 368, 380, 390, and 406.

[0317] More particularly, the invention relates to an isolated nucleic acid molecule comprising a nucleotide sequence

[0318] a) as given in the SEQ ID NOs identified in Table 1 such as SEQ ID: 3, 5, 13, 15, 21, 33, 35, 37, 45, 49, 59, 61, 65, 91, 95, 119, 123, 131, 147, 163, 169, 173, 183, 187, 195, 197, 219, 251, 269, 287, 303, 309, 311, 323, 329, 331, 333, 337, 341, 361, 367, 379, 389, and 405;

[0319] b) having substantial similarity to (a);

[0320] c) having at least 15 nucleotides and capable of hybridizing to (a) or the complement thereof;

[0321] d) having at least 15 nucleotides and capable of hybridizing to a nucleic acid comprising 50 to 200 or more consecutive nucleotides of a nucleotide sequence of (a), or the complement thereof under stringent, highly stringent, or very highly stringent conditions;

[0322] e) complementary to (a), (b) or (c); and

[0323] f) which is a reverse complement of (a), (b) or (c).

[0324] By providing these genes it is now possible to regulate the expression levels of the encoded protein products in the plant by applying methods known in the art including overexpressing or down-regulating the nucleic acid molecule in a plant, thereby modifying the phytosterol and brassinosteroid content of the plant, respectively.

[0325] Because of their well-established cholesterol-lowering activities, plant sterols have been implicated with providing an improved protection against coronary heart disease; in addition, certain reports indicate that phytosterols may have an impact on reducing the risk of certain cancers (Jones and Raeini-Sarjaz, Nutr. Rev. 59:21, 2001). The over-expression of genes involved in the biosynthesis of sterols may thus be desireable to obtain high sterol plants to be used in margerines and nutritional supplements.

[0326] In a further embodment the invention further relates to an isolated nucleic acid molecule comprising a nucleotide sequence encoding a polypeptide the activity of which is involved in or associated with the biosynthesis of ubiquinone in mitochondria which nucleotide sequence is substantially similar to a sequence encoding a polypeptide as given in any one of the SEQ ID NOs of Table 1 such as SEQ ID NOs: 8, 240, and 382.

[0327] Ubiquinone is an integral part of the respiratory chain in mitochondria. The first committed step of the biosynthetic pathway to ubiquinone, which is an integral part of the mitochondrial electron transfer chain, is catalyzed by p-hydroxybenzoate solanesyltransferase. A homologue of the eubacterial (ubiA) and the yeast (CoQ2) genes for this enyzme (Meganathan, FEMS Microbiol. Lett., 203:131, 2001) is detectable in the A. thaliana genome and, according to a TargetP analysis, specifies a protein with the required N-terminal mitochondrial targeting sequence. Additional homologues to eubacterial/yeast genes involved in this pathway include a monooxygenase (ubiF/CoQ7-like), a bifuctional O-methyltransferase (CoQ3-like; Avelange-Macharel and Joyard, Plant J., 14:203 1998), two C-methyltransferases (ubiH/CoQ6-like and ubiE/CoQ5-like), and a CoQ4-like sequence (function unknown). The C-methyltransferases are part of a larger gene family and their involvement in ubiquinone biosynthesis is suggested only by the presence of an encoded mitochondrial targeting sequence.

[0328] In particular, the invention relates to an isolated nucleic acid molecule comprising a nucleotide sequence encoding a polypeptide the activity of which is involved in or associated with the biosynthesis of ubiquinone in mitochondria, and which is substantially similar, and preferably has at least between 70%, and 99% amino acid sequence identity to at least one polypeptide as given in any one of the SEQ ID NOs of Table 1 such as SEQ ID NOs: 8, 240, and 382, with any individual number within this range of between 70% and 99% also being part of the invention.

[0329] The invention further relates to an isolated nucleic acid molecule comprising a nucleotide sequence encoding a polypeptide the activity of which is involved in or associated with the biosynthesis of ubiquinone in mitochondria, and which is immunologically reactive with antibodies raised against a polypeptide as given in any one of the SEQ ID NOs of Table 1 such as SEQ ID NOs: 8, 240, and 382

[0330] More particularly, the invention relates to an isolated nucleic acid molecule comprising a nucleotide sequence

[0331] m) as given in in any one of the SEQ ID NOs of Table 1 such as SEQ ID NOs: 7, 239, and 381;

[0332] n) having substantial similarity to (a);

[0333] o) having at least 15 nucleotides and capable of hybridizing to (a) or the complement thereof under stringent, highly stringent or very highly stringent conditions;

[0334] p) having at least 15 nucleotides and capable of hybridizing to a nucleic acid comprising 50 to 200 or more consecutive nucleotides of a nucleotide sequence of (a) or the complement thereof under stringent, highly stingent or very highly stringent conditions;

[0335] q) complementary to (a), (b) or (c); and

[0336] r) which is a reverse complement of (a), (b) or (c).

[0337] By providing these genes it is now possible to regulate the expression levels of the encoded protein products in the plant by applying methods known in the art including overexpressing or down-regulating the nucleic acid molecule in a plant, thereby modifying the ubiquinone content of the plant, respectively.

[0338] Coenzyme Q10 (CoQ10) has a pathophysiologic role in many disease states, including heart failure, angina, and hypertension (Tran et al., Pharmacotherapy, 21:797, 2001). Thus, an over-expression of genes involved in ubiqionone biosynthesis in transgenic plants may be of use in the nutraceutical marketplace.

[0339] The invention provides a further subset of genes comprising a nucleotide sequence that encodes polypeptides which exhibit an enzymatic activity that is involved in or associated with the biosynthesis of monoterpenes and sesquiterpenes.

[0340] In a particular embodiment, the invention thus relates to an isolated nucleic acid molecule comprising a nucleotide sequence encoding a polypeptide the activity of which is involved in or associated with the biosynthesis of monoterpenes and sesquiterpenes, which nucleotide sequence is substantially similar to a nucleic acid sequence encoding a polypeptide as given in the SEQ ID NOs identified in Table 1 such as SEQ ID NOs: 2, 10, 20, 40, 42, 44, 52, 56, 58, 70, 72, 78, 82, 100, 102, 110, 116, 130, 138, 146, 152, 158, 160, 168, 172, 180, 182, 186, 202, 210, 212, 218, 228, 232, 234, 242, 248, 250, 258, 264, 274, 280, 282, 284, 306, 320, 322, 328, 348, 352, 358, 370, 376, 386, 388, and 404.

[0341] More specifically, the invention relates to an isolated nucleic acid molecule comprising a nucleotide sequence encoding a polypeptide the activity of which is involved in or associated with the biosynthesis of monoterpenes and sesquiterpenes, and which has at least between 70%, and 99% amino acid sequence identity to at least one polypeptide as given in the SEQ ID NOs identified in Table 1 such as SEQ ID NOs: 2, 10, 20, 40, 42, 44, 52, 56, 58, 70, 72, 78, 82, 100, 102, 110, 116, 130, 138, 146, 152, 158, 160, 168, 172, 180, 182, 186, 202, 210, 212, 218, 228, 232, 234, 242, 248, 250, 258, 264, 274, 280, 282, 284, 306, 320, 322, 328, 348, 352, 358, 370, 376, 386, 388 and 404, with any individual number within this range of between 70% and 99% also being part of the invention.

[0342] The invention further relates to an isolated nucleic acid molecule comprising a nucleotide sequence encoding a polypeptide the activity of which is involved in or associated with the biosynthesis of monoterpenes and sesquiterpenes, and which is immunologically reactive with antibodies raised against a polypeptide as given in the SEQ ID NOs identified in Table 1 such as SEQ ID NOs: 2, 10, 20, 40, 42, 44, 52, 56, 58, 70, 72, 78, 82, 100, 102, 110, 116, 130, 138, 146, 152, 158, 160, 168, 172, 180, 182, 186, 202, 210, 212, 218, 228, 232, 234, 242, 248, 250, 258, 264, 274, 280, 282, 284, 306, 320, 322, 328, 348, 352, 358, 370, 376, 386, 388 and 404.

[0343] More particularly, the invention relates to an isolated nucleic acid molecule comprising a nucleotide sequence

[0344] g) as given in any one of the SEQ ID NOs identified in Table 1 such as SEQ ID NOs:1, 9, 19, 39, 41, 43, 51, 55, 57, 69, 71, 77, 81, 99, 101, 109, 115, 129, 137, 145, 151, 157, 159, 167, 171, 179, 181, 185, 201, 209, 211, 217, 227, 231, 233, 241, 247, 249, 257, 263, 273, 279, 281, 283, 305, 319, 321, 327, 347, 351, 357, 369, 375, 385, 387, and 403;

[0345] h) having substantial similarity to (a);

[0346] i) having at least 15 nucleotides and capable of hybridizing to (a) or the complement thereof under stringent, highly stringent or very highly stringent conditions;

[0347] j) having at least 15 nucleotides and capable of hybridizing to a nucleic acid comprising 50 to 200 or more consecutive nucleotides of a nucleotide sequence of (a), or the complement thereof under stringent, highly stringent or very highly stringent conditions;

[0348] k) complementary to (a), (b) or (c); and

[0349] l) which is a reverse complement of (a), (b) or (c).

[0350] By providing these genes it is now possible to regulate the expression levels of the encoded protein products in the plant by applying methods known in the art including overexpressing or down-regulating the nucleic acid molecule in a plant, thereby modifying the monoterpene and sesquiterpene content of the plant, respectively.

[0351] For example, A. thaliana has been reported to emit a complex mixture of volatiles as a response to herbivory, which also includes monoterpenoids (Van Poeke et al., J. Chem. Ecol., 27:1911, 2001). The A. thaliana genome encodes a large family of enzymes with homology to monoterpene and sesquiterpene synthases, which catalyze the first committed step to terpenoids. Thus far, only one gene product, a myrcine/β-ocimene synthase, has been characterized from A. thaliana (Bohlmann et al., Arch. Biochem. Biophys., 375:261, 2000).

[0352] In a further embodiment the invention provides a subset of genes which encode polypeoptides that are involved in or associated with protein prenylation.

[0353] Protein prenylation, a post-translational modification which involves the covalent attachment of famesyl (C15) or geranylgeranyl (C20) isoprenoid moieties to target proteins in the cytosol, plays important roles in signal transduction and intracellular trafficking pathways (Crowell, Prog. Lipid Res., 39:393, 2000). The transfer of the prenyl group is catalyzed by famesyltransferase (FTase) and geranylgeranyltransferase (GGTase). FTase and GGTase I act as heterodimers with a common α-subunit (Qian et al, Plant Cell, 8:2381, 1996; Yalovski et al., Mol. Cell. Biol., 17:1986, 1997) and a distict β-subunit (Caldelari et al., Plant Physiol., 126:1416, 2001). All of these subunits occur as single copy genes in A. thaliana genome. Protein geranylgeranyltransferase II was first cloned and characterized from rat (Armstrong et al., J. Biol. Chem., 268:12221, 1993), and homologues for both the α-subunit and the α-subunit are detectable in the A. thaliana genome (two copies each). Geranylgeranyl diphosphate, the precursor for geranylgeranylations, stems most likely from a cytosolic pool provided by two cytosolic GGPPS isoenzymes (Okada et al., Plant Physiol., 122:1045, 2000). A second protein prenylation pathway, that involves a modification with phytol (C20), has been described for plant plastids.

[0354] In one specific embodiment, the invention relates to an isolated nucleic acid molecule encoding a polypeptide that is involved in or associated with protein prenylation, which nucleotide sequence is substantially similar to a nucleic acid sequence encoding a polypeptide as given in any one of the SEQ ID NOs of Table 1 such as SEQ ID NOs: 24, 64, 190, 256, 290, 344, and 374.

[0355] More specifically, the invention relates to an isolated nucleic acid molecule the expression product of which is involved in or associated with protein prenylation comprising a nucleotide sequence encoding a polypeptide that is involved in or associated with protein prenylation and has at least between 70%, and 99% amino acid sequence identity to at least one polypeptide as given in any one of the SEQ ID NOs of Table 1 such as SEQ ID NOs: 24, 64, 190, 256, 290, 344, and 374, with any individual number within this range of between 70% and 99% also being part of the invention.

[0356] The invention further relates to an isolated nucleic acid molecule the expression product of which is involved in or associated with protein prenylation comprising a nucleotide sequence encoding a polypeptide that is involved in or associated with protein prenylation and immunologically reactive with antibodies raised against a polypeptide as given in any one of the SEQ ID NOs of Table I such as SEQ ID NOs: 24, 64, 190, 256, 290, 344, and 374.

[0357] More particularly, the invention relates to an isolated nucleic acid molecule comprising a nucleotide sequence

[0358] a) as given in any one of the SEQ ID NOs of Table 1 such as SEQ ID NOs: 23, 63, 189, 255, 289, 343, and 373;

[0359] b) having substantial similarity to (a);

[0360] c) having at least 15 nucleotides and capable of hybridizing to (a) or the complement thereof under stringent, highly stringent or very highly stringent conditions;

[0361] d) having at least 15 nucleotides and capable of hybridizing to a nucleic acid comprising 50 to 200 or more consecutive nucleotides of a nucleotide sequences of (a) or the complement thereof under stringent, highly stringent or very highly stringent conditions;

[0362] e) complementary to (a), (b) or (c); and

[0363] f) which is a reverse complement of (a), (b) or (c).

[0364] By providing these genes it is now possible to regulate the expression levels of the encoded protein products in the plant by applying methods known in the art including overexpressing or down-regulating the nucleic acid molecule in a plant, thereby modifying the protein prenylation pattern of the plant.

[0365] The demonstration that the human Ras protein requires prenylation for its cancer-causing activity has led to an intense search for famesyltransferase and geranylgeranyl-transferase inhibitors as potential anticancer drugs (Sebti and Hamilton, Pharmacol. Ther., 74:103, 1997).

[0366] The plant enzymes could be used in small molecule screens to disrupt protein prenylation. The assembly of the core oligosaccharide region of asparagine-linked glycoproteins proceeds by means of the dolichol pathway (Lerouge et al., Curr. Pharm. Biotechnol., 1:347, 2000).

[0367] The number of therapeutic proteins successfully produced in plants is steadily increasing and is expected to grow even more rapidly in the future. Most therapeutic proteins are glycoproteins and N-glycosylation is often essential for their stability, folding and biological activity.

[0368] Recombinant glycoproteins of mammalian origin expressed in transgenic plants largely retain their biological activity. However, plants are not ideal for production of pharmaceutical proteins because they produce molecules with glycans that are not compatible with therapeutic applications in humans.

[0369] As a consequence, strategies to humanise plant N-glycans are now developed, and expression changes in the prenyltransferases necessary to produce the dolichol chains of glycans may be of use. A knock-out mutant of the beta-subunit of farnesyltransferase shows a reduction in transpirational water loss in dry growing conditions (Pei et al., Science 282:287, 1998), The present invention provides a set of genes, which are shown to be involved in isoprenoid metabolism as specified hereinbefore. The genes within this subgroup are useful tools for generating plants with modified compositional characteristics leading to improved nutritional and/or pharmaceutical properties.

[0370] Based on the Oryza nucleic acid sequences of the present invention as given in the SEQ ID NOs of the Sequence Listing, orthologs may be identified or isolated from the genome of any desired organism, preferably from another plant, but especially from a cereal plant such as wheat, banana, barley, maize, etc, according to well known techniques based on their sequence similarity to the Oryza nucleic acid sequences, e.g., hybridization, PCR or computer generated sequence comparisons. For example, all or a portion of a particular Oryza nucleic acid sequence is used as a probe that selectively hybridizes to other gene sequences present in a population of cloned genomic DNA fragments or cDNA fragments (i.e., genomic or cDNA libraries) from a chosen source organism. Further, suitable genomic and cDNA libraries may be prepared from any cell or tissue of an organism. Such techniques include hybridization screening of plated DNA libraries (either plaques or colonies; see, e.g., Sambrook et al., Molecular Cloning, 2^{nd} ed. Cold Spring Harbor Laboratory Press, 1989) and amplification by PCR using oligonucleotide primers preferably corresponding to sequence domains conserved among related polypeptide or subsequences of the nucleotide sequences provided herein (see, e.g., Innis et al., supra). These methods are particularly well suited to the isolation of gene sequences from organisms closely related to the organism from which the probe sequence is derived. The application of these methods using the Oryza sequences as probes is well suited for the isolation of gene sequences from any source organism, preferably other plant species. In a PCR approach, oligonucleotide primers can be designed for use in PCR reactions to amplify corresponding DNA sequences from cDNA or genomic DNA extracted from any plant of interest. Methods for designing PCR primers and PCR cloning are generally known in the art.

[0371] In hybridization techniques, all or part of a known nucleotide sequence is used as a probe that selectively hybridizes to other corresponding nucleotide sequences present in a population of cloned genomic DNA fragments or cDNA fragments (i.e., genomic or cDNA libraries) from a chosen organism. The hybridization probes may be genomic DNA fragments, cDNA fragments, RNA fragments, or other oligonucleotides, and may be labeled with a detectable group such as ³²P, or any other detectable marker. Thus, for example, probes for hybridization can be made by labeling synthetic oligonucleotides based on the sequence of the invention. Methods for preparation of probes for hybridization and for construction of cDNA and genomic libraries are generally known in the art and are disclosed in Sambrook et al., supra. In general, sequences that hybridize to the sequences disclosed herein will have at least 40% to 50%, about 60% to 70% and even about 80% 85%, 90%, 95% to 98% or more identity with the disclosed sequences. That is, the sequence similarity of sequences may range, sharing at least about 40% to 50%, about 60% to 70%, and even about 80%, 85%, 90%, 95% to 98% sequence similarity, with each individual number within the ranges given above also being part of the invention.

[0372] The nucleic acid molecules of the invention can also be identified by, for example, a search of known databases for genes encoding polypeptides having a specified amino acid sequence identity or DNA having a specified nucleotide sequence identity. Methods of alignment of sequences for comparison are well known in the art and are described hereinabove.

[0373] The present invention further provides a composition, an expression cassette or a recombinant vector containing the nucleic acid molecule of the invention as disclosed herinbefore, and host cells comprising the expression cassette or vector, e.g., comprising a plasmid.

[0374] In particular, the present invention provides an expression cassette or a recombinant vector comprising a suitable promoter linked to a nucleic acid segment of the invention, representative examples of which are provided in the SEQ ID NOs of the Sequence Listing, which, when present in a plant, plant cell or plant tissue, results in transcription of the linked nucleic acid segment.

[0375] Promoters which are useful for plant transgene expression include those that are inducible, viral, synthetic, constitutive (Odell et al., Nature, 313:810, 1985), temporally regulated, spatially regulated, tissue-specific, and spatio-temporally regulated.

[0376] Where expression in specific tissues or organs is desired, tissue-specific promoters may be used. In contrast, where gene expression in response to a stimulus is desired, inducible promoters are the regulatory elements of choice. Where continuous expression is desired throughout the cells of a plant, constitutive promoters are utilized. Additional regulatory sequences upstream and/or downstream from the core promoter sequence may be included in expression constructs of transformation vectors to bring about varying levels of expression of heterologous nucleotide sequences in a transgenic plant.

[0377] Suitable promoter and/or regulatory sequences further include those that are preferentially or specifically active in selected plant tissues such as, for example, the gree tissue (leaf, stem), grain (grain endosperm or the grain embryo), fruit, flower, etc.

[0378] Further, the invention provides isolated polypeptides encoded by any one of the open reading frames of the invention, representative examples of which are provided in the SEQ ID NOs of the Sequence Listing, or a fragment thereof, which encodes a polypeptide which has substantially the same activity as the corresponding polypeptide encoded by an ORF given in the SEQ ID NOs of the Sequence Listing, or the orthologs thereof.

[0379] Virtually any DNA composition may be used for delivery to recipient plant cells, e.g., monocotyledonous cells, to ultimately produce fertile transgenic plants in accordance with the present invention. For example, DNA segments or fragments in the form of vectors and plasmids, or linear DNA segments or fragments, in some instances containing only the DNA element to be expressed in the plant, and the like, may be employed. The construction of vectors which may be employed in conjunction with the present invention will be known to those of skill of the art in light of the present disclosure (see, e.g., Sambrook et al., 1989; Gelvin et al., Plant Molecular Biology Manual, Kluwer Academic Publishers, 1990).

[0380] It is one of the objects of the present invention to provide recombinant DNA molecules comprising a nucleotide sequence which directs transcription according to the invention operably linked to a nucleic acid segment or sequence of interest.

[0381] The nucleic acid segment of interest can, for example, code for a ribosomal RNA, an antisense RNA or any other type of RNA that is not translated into protein. In another preferred embodiment of the invention, the nucleic acid segment of interest is translated into a protein product. The nucleotide sequence which directs transcription and/or the nucleic acid segment may be of homologous or heterologous origin with respect to the plant to be transformed. A recombinant DNA molecule useful for introduction into plant cells includes that which has been derived or isolated from any source, that may be subsequently characterized as to structure, size and/or function, chemically altered, and later introduced into plants. An example of a nucleotide sequence or segment of interest “derived” from a source, would be a nucleotide sequence or segment that is identified as a useful fragment within a given organism, and which is then chemically synthesized in essentially pure form. An example of such a nucleotide sequence or segment of interest “isolated” from a source, would be nucleotide sequence or segment that is excised or removed from said source by chemical means, e.g., by the use of restriction endonucleases, so that it can be further manipulated, e.g., amplified, for use in the invention, by the methodology of genetic engineering. Such a nucleotide sequence or segment is commonly referred to as “recombinant.”

[0382] Therefore a useful nucleotide sequence, segment or fragment of interest includes completely synthetic DNA, semi-synthetic DNA, DNA isolated from biological sources, and DNA derived from introduced RNA. Generally, the introduced DNA is not originally resident in the plant genotype which is the recipient of the DNA, but it is within the scope of the invention to isolate a gene from a given plant genotype, and to subsequently introduce multiple copies of the gene into the same genotype, e.g., to enhance production of a given gene product such as a storage protein or a protein that is involved in carbohydrate metabolism or any other gene of interest as provided in the SEQ ID NOs of the sequence listing.

[0383] The introduced recombinant DNA molecule includes but is not limited to, DNA from plant genes, and non-plant genes such as those from bacteria, yeasts, animals or viruses. The introduced DNA can include modified genes, portions of genes, or chimeric genes, including genes from the same or different genotype. The term “chimeric gene” or “chimeric DNA” is defined as a gene or DNA sequence or segment comprising at least two DNA sequences or segments from species which do not combine DNA under natural conditions, or which DNA sequences or segments are positioned or linked in a manner which does not normally occur in the native genome of untransformed plant.

[0384] The introduced recombinant DNA molecule used for transformation herein may be circular or linear, double-stranded or single-stranded. Generally, the DNA is in the form of chimeric DNA, such as plasmid DNA, that can also contain coding regions flanked by regulatory sequences which promote the expression of the recombinant DNA present in the resultant plant.

[0385] Generally, the introduced recombinant DNA molecule will be relatively small, i.e., less than about 30 kb to minimize any susceptibility to physical, chemical, or enzymatic degradation which is known to increase as the size of the nucleotide molecule increases. As noted above, the number of proteins, RNA transcripts or mixtures thereof which is introduced into the plant genome is preferably preselected and defined, e.g., from one to about 5-10 such products of the introduced DNA may be formed.

[0386] This expression cassette or vector may be contained in a host cell. The expression cassette or vector may augment the genome of a transformed plant or may be maintained extrachromosomally. The expression cassette may be operatively linked to a structural gene, the open reading frame thereof, or a portion thereof. The expression cassette may further comprise a Ti plasmid and be contained in an Agrobacterium tumefaciens cell; it may be carried on a microparticle, wherein the microparticle is suitable for ballistic transformation of a plant cell; or it may be contained in a plant cell or protoplast. Further, the expression cassette or vector can be contained in a transformed plant or cells thereof, and the plant may be a dicot or a monocot. In particular, the plant may be a cereal plant.

[0387] Obtaining sufficient levels of transgene expression in the appropriate plant tissues is an important aspect in the production of genetically engineered crops. Expression of heterologous DNA sequences in a plant host is dependent upon the presence of an operably linked promoter that is functional within the plant host. Choice of the promoter sequence will determine when and where within the organism the heterologous DNA sequence is expressed.

[0388] For example, for overexpression, a plant promoter fragment may be employed which will direct expression of the gene in all tissue; of a regenerated plant. Such promoters are referred to herein as “constitutive” promoters and are active under most environmental conditions and states of development or cell differentiation. Examples of constitutive promoters include the cauliflower mosaic virus (CaMV) 35S transcription initiation region, the 1′- or 2′-promoter derived from T-DNA of Agrobacterium tumafaciens, and other transcription initiation regions from various plant genes known to those of skill. Such genes include for example, the AP2 gene, ACT11 from Arabidopsis (Huang et al., Plant Mol. Biol., 33:125, 1996), Cat3 from Arabidopsis (GenBank No. U43147, Zhong et al., Mol. Gen. Genet., 251:196, 1996), the gene encoding stearoyl-acyl carrier protein desaturase from Brassica napus (Genbank No. X74782, Solocombe et al., Plant Physiol., 104:1167, 1994), GPcl from maize (GenBank No. X15596, Martinez et al., J. Mol. Biol., 208:551, 1989), and Gpc2 from maize (GenBank No. U45855, Manjunath et al., Plant Mol. Biol., 33:97, 1997).

[0389] Alternatively, the plant promoter may direct expression of the nucleic acid molecules of the invention in a specific tissue or may be otherwise under more precise environmental or developmental control. Examples of environmental conditions that may effect transcription by inducible promoters include anaerobic conditions, elevated temperature, or the presence of light. Such promoters are referred to here as “inducible” or “tissue-specific” promoters. One of skill will recognize that a tissue-specific promoter may drive expression of operably linked sequences in tissues other than the target tissue. Thus, as used herein a tissue-specific promoter is one that drives expression preferentially in the target tissue, but may also lead to some expression in other tissues as well.

[0390] Examples of promoters under developmental control include promoters that initiate transcription only (or primarily only) in certain tissues, such as fruit, seeds, or flowers. Promoters that direct expression of nucleic acids in ovules, flowers or seeds are particularly useful in the present invention. As used herein a seed-specific or preferential promoter is one which directs expression specifically or preferentially in seed tissues, such promoters may be, for example, ovule-specific, embryo-specific, endosperm-specific, integument-specific, seed coat-specific, or some combination thereof. Examples include a promoter from the ovule-specific BEL1 gene described in Reiser et al., Cell 83:735, 1995; (GenBank No. U39944). Other suitable seed specific promoters are derived from the following genes: MACI from maize (Sheridan et al., Genetics 142:1009, 1996), Cat3 from maize (GenBank No. L05934, Abler et al. Plant Mol. Biol., 22:10131, 1993), the gene encoding oleosin 18 kD from maize (GenBank No, J05212, Lee et al. Plant Mol. Biol., 26:1981, 1994), vivparous-1 from Arabidopsis (Genbank No. U93215), the gene encoding oleosin from Arabidopsis (Genbank No. Z17657), Atmycl from Arabidopsis (Urao et al., Plant Mol. Biol., 32:571, 1996), the 2s seed storage protein gene family from Arabidopsis (Conceicao et al., Plant 5:493, 1994) the gene encoding oleosin 20 kD from Brassica napus (GenBank No. M63985), napA from Brassica napus (GenBank No. J02798, Josefsson et al. J. Biol. Chem., 262:12196, 1987), the napin gene family from Brassica napus (Sjodahl et al., Planta, 197:264, 1995), the gene encoding the 2S storage protein from Brassica napus (Dasgupta et al., Gene 133:301, 1993), the genes encoding oleosin A (Genbank No. U09118) and oleosin B (Genbank No. U09119) from soybean and the gene encoding low molecular weight sulphur rich protein from soybean (Choi et al., Mol Gen, Genet., 246:266, 1995).

[0391] It is specifically contemplated that one could use one of the promoters that are disclosed in co-pending provisional U.S. application serial no 60/325,448, filed Sep. 26, 2001 in unaltered or altered form. Especially preferred are promoters that direct transcription of an associated nucleic acid molecule specifically or preferentially in tissues of the plant grain such as those provided in SEQ ID NOs: 2275-2672.

[0392] Mutagenization of a promoter such as those mentioned hereinbefore or those provided in provisional U.S. application serial no 60/325,448 may potentially improve the utility of the elements for the expression of transgenes in plants. The mutagenesis of these elements can be carried out at random and the mutagenized promoter sequences screened for activity in a trial-by-error procedure.

[0393] Alternatively, particular sequences which provide the promoter with desirable expression characteristics, or the promoter with expression enhancement activity, could be identified and these or similar sequences introduced into the sequences via mutation. It is further contemplated that one could mutagenize these sequences in order to enhance their expression of transgenes in a particular species.

[0394] Furthermore, it is contemplated that promoters combining elements from more than one promoter may be useful. For example, U.S. Pat. No. 5,491,288 discloses combining a Cauliflower Mosaic Virus promoter with a histone promoter. Thus, the elements from the promoters disclosed herein may be combined with elements from other promoters.

[0395] A variety of 5′ and 3′ transcriptional regulatory sequences are available for use in the present invention. Transcriptional terminators are responsible for the termination of transcription and correct mRNA polyadenylation. The 3′ nontranslated regulatory DNA sequence preferably includes from about 50 to about 1,000, more preferably about 100 to about 1,000, nucleotide base pairs and contains plant transcriptional and translational termination sequences. Appropriate transcriptional terminators and those which are known to function in plants include the CaMV ³⁵S terminator, the tml terminator, the nopaline synthase terminator, the pea rbcS E9 terminator, the terminator for the T7 transcript from the octopine synthase gene of Agrobacterium tumefaciens, and the 3′ end of the protease inhibitor I or II genes from potato or tomato, although other 3′ elements known to those of skill in the art can also be employed. Alternatively, one also could use a gamma coixin, oleosin 3 or other terminator from the genus Coix.

[0396] Preferred 3′ elements include those from the nopaline synthase gene of Agrobacterium tumefaciens (Bevan et al., Nature, 304:184, 1983), the terminator for the T7 transcript from the octopine synthase gene of Agrobacterium tumefaciens, and the 3′ end of the protease inhibitor I or II genes from potato or tomato.

[0397] As the DNA sequence between the transcription initiation site and the start of the coding sequence, i.e., the untranslated leader sequence, can influence gene expression, one may also wish to employ a particular leader sequence. Preferred leader sequences are contemplated to include those which include sequences predicted to direct optimum expression of the attached gene, i.e., to include a preferred consensus leader sequence which may increase or maintain mRNA stability and prevent inappropriate initiation of translation. The choice of such sequences will be known to those of skill in the art in light of the present disclosure. Sequences that are derived from genes that are highly expressed in plants will be most preferred.

[0398] Other sequences that have been found to enhance gene expression in transgenic plants include intron sequences (e.g., from Adhl, bronzel, actin 1, actin 2 (WO 00/760067), or the sucrose synthase intron) and viral leader sequences (e.g., from TMV, MCMV and AMV). For example, a number of non-translated leader sequences derived from viruses are known to enhance expression. Specifically, leader sequences from Tobacco Mosaic Virus (TMV), Maize Chlorotic Mottle Virus (MCMV), and Alfalfa Mosaic Virus (AMV) have been shown to be effective in enhancing expression (e.g., Gallie et al., Nuc. Acids Res., 15:3257, 1987; Skuzeski et al., Plant Mol. Biol, 15;65, 1990). Other leaders known in the art include but are not limited to: Picornavirus leaders, for example, EMCV leader (Encephalomyocarditis 5 noncoding region) (Elroy-Stein et al., Proc. Natl. Acad. Sci. USA., 86:6126, 1989); Polyvirus leaders, for example, TEV leader (Tobacco Etch Virus); MDMV leader (Maize Dwarf Mosaic Virus); Human immunoglobulin heavy-chain binding protein (BiP) leader, (Macejak et al., Nature, 353:90, 1991); Untranslated leader from the coat protein mRNA of alfalfa mosaic virus (AMV RNA 4), (Jobling et al., Nature, 325:622, 1987; Tobacco mosaic virus leader (TMV), (Gallie et al., Plant Cell, 1:301, 1989; and Maize Chlorotic Mottle Virus leader (MCMV) (Lommel et al., Virology, 181:382, 1991. See also, Della-Cioppa et al., Plant Physiol., 84:965, 1987.

[0399] Regulatory elements such as Adh intron 1 (Callis et al., Genes Dev., 1:1183, 1987), sucrose synthase intron (Vasil et al., Mol. Microbiol., 3:371, 1989) or TMV omega element (Gallie, et al., Plant Cell, 1:301, 1989), may further be included where desired.

[0400] Examples of enhancers include elements from the CaMV ³⁵S promoter, octopine synthase genes (Ellis el al., EMBO J, 6:3203, 1987), the rice actin I gene, the maize alcohol dehydrogenase gene (Callis et al., Genes Dev., 1:1183, 1987), the maize shrunken I gene (Vasil et al., Mol. Microbiol., 3:371, 1989), TMV Omega element (Gallie et al., Plant Cell, 1:301, 1989) and promoters from non-plant eukaryotes (e.g. yeast; Ma et al., Nature, 334:631, 1988).

[0401] Two principal methods for the control of expression are known, viz.: overexpression and underexpression. Overexpression can be achieved by insertion of one or more than one extra copy of the selected gene. It is, however, not unknown for plants or their progeny, originally transformed with one or more than one extra copy of a nucleotide sequence, to exhibit the effects of underexpression as well as overexpression. For underexpression there are two principle methods which are commonly referred to in the art as “antisense downregulation” and “sense downregulation” (sense downregulation is also referred to as “cosuppression”). Generically these processes are referred to as “gene silencing”. Both of these methods lead to an inhibition of expression of the target gene.

[0402] Within the scope of the present invention, the alteration in expression of the nucleic acid molecule of the present invention may be achieved in one of the following ways:

[0403] (1) “Sense” Suppression

[0404] Alteration of the expression of a nucleotide sequence of the present invention, preferably reduction of its expression, is obtained by “sense” suppression (referenced in e.g. Jorgensen et al., Plant Mol. Biol., 31:957, 1996). In this case, the entirety or a portion of a nucleotide sequence of the present invention is comprised in a DNA molecule. The DNA molecule is preferably operatively linked to a promoter functional in a cell comprising the target gene, preferably a plant cell, and introduced into the cell, in which the nucleotide sequence is expressible. The nucleotide sequence is inserted in the DNA molecule in the “sense orientation”, meaning that the coding strand of the nucleotide sequence can be transcribed. In a preferred embodiment, the nucleotide sequence is fully translatable and all the genetic information comprised in the nucleotide sequence, or portion thereof, is translated into a polypeptide. In another preferred embodiment, the nucleotide sequence is partially translatable and a short peptide is translated. In a preferred embodiment, this is achieved by inserting at least one premature stop codon in the nucleotide sequence, which bring translation to a halt. In another more preferred embodiment, the nucleotide sequence is transcribed but no translation product is being made. This is usually achieved by removing the start codon, e.g. the “ATG”, of the polypeptide encoded by the nucleotide sequence. In a further preferred embodiment, the DNA molecule comprising the nucleotide sequence, or a portion thereof, is stably integrated in the genome of the plant cell. In another preferred embodiment, the DNA molecule comprising the nucleotide sequence, or a portion thereof, is comprised in an extrachromosomally replicating molecule.

[0405] In transgenic plants containing one of the DNA molecules described immediately above, the expression of the nucleotide sequence corresponding to the nucleotide sequence comprised in the DNA molecule is preferably reduced. Preferably, the nucleotide sequence in the DNA molecule is at least 70% identical to the nucleotide sequence the expression of which is reduced, more preferably it is at least 80% identical, yet more preferably at least 90% identical, yet more preferably at least 95% identical, yet more preferably at least 99% identical.

[0406] (2) “Anti-Sense” Suppression

[0407] In another preferred embodiment, the alteration of the expression of a nucleotide sequence of the present invention, preferably the reduction of its expression is obtained by “anti-sense” suppression. The entirety or a portion of a nucleotide sequence of the present invention is comprised in a DNA molecule. The DNA molecule is preferably operatively linked to a promoter functional in a plant cell, and introduced in a plant cell, in which the nucleotide sequence is expressible. The nucleotide sequence is inserted in the DNA molecule in the “anti-sense orientation”, meaning that the reverse complement (also called sometimes non-coding strand) of the nucleotide sequence can be transcribed. In a preferred embodiment, the DNA molecule comprising the nucleotide sequence, or a portion thereof, is stably integrated in the genome of the plant cell. In another preferred embodiment the DNA molecule comprising the nucleotide sequence, or a portion thereof, is comprised in an extrachromosomally replicating molecule. Several publications describing this approach are cited for further illustration (Green, P. J. et al., Ann. Rev. Biochem., 55:569, 1986); Mol and van der Krol, A. R., eds., Antisense Nuc. Acids & Proteins, Marcel Dekker, pp. 125-141, 1991; Abel, P. P. et al., Proc. Natl. Acad. Sci. USA, 86:6949, 1989; Ecker, J. R. et al., Proc. Natl. Acad. Sci. USA, 83:5372, 1986).

[0408] In transgenic plants containing one of the DNA molecules described immediately above, the expression of the nucleotide sequence corresponding to the nucleotide sequence comprised in the DNA molecule is preferably reduced. Preferably, the nucleotide sequence in the DNA molecule is at least 70% identical to the nucleotide sequence the expression of which is reduced, more preferably it is at least 80% identical, yet more preferably at least 90% identical, yet more preferably at least 95% identical, yet more preferably at least 99% identical.

[0409] (3) Homologous Recombination

[0410] In another preferred embodiment, at least one genomic copy corresponding to a nucleotide sequence of the present invention is modified in the genome of the plant by homologous recombination as further illustrated in Paszkowski et al., EMBO J, 7:4021, 1988. This technique uses the property of homologous sequences to recognize each other and to exchange nucleotide sequences between each by a process known in the art as homologous recombination. Homologous recombination can occur between the chromosomal copy of a nucleotide sequence in a cell and an incoming copy of the nucleotide sequence introduced in the cell by transformation. Specific modifications are thus accurately introduced in the chromosomal copy of the nucleotide sequence. In one embodiment, the regulatory elements of the nucleotide sequence of the present invention are modified. Such regulatory elements are easily obtainable by screening a genomic library using the nucleotide sequence of the present invention, or a portion thereof, as a probe. The existing regulatory elements are replaced by different regulatory elements, thus altering expression of the nucleotide sequence, or they are mutated or deleted, thus abolishing the expression of the nucleotide sequence. In another embodiment, the nucleotide sequence is modified by deletion of a part of the nucleotide sequence or the entire nucleotide sequence, or by mutation. Expression of a mutated polypeptide in a plant cell is also contemplated in the present invention. More recent refinements of this technique to disrupt endogenous plant genes have been described (Kempin et al., Nature, 389:802, 1997 and Miao and Lam, Plant J., 7:359, 1995.

[0411] In another preferred embodiment, a mutation in the chromosomal copy of a nucleotide sequence is introduced by transforming a cell with a chimeric oligonucleotide composed of a contiguous stretch of RNA and DNA residues in a duplex conformation with double hairpin caps on the ends. An additional feature of the oligonucleotide is for example the presence of 2′-O-methylation at the RNA residues. The RNA/DNA sequence is designed to align with the sequence of a chromosomal copy of a nucleotide sequence of the present invention and to contain the desired nucleotide change. For example, this technique is further illustrated in U.S. Pat. No. 5,501,967 and Zhu et al., Proc. Natl. Acad. Sci. USA, 96:8768, 1999.

[0412] (4) Ribozymes

[0413] In a further embodiment, the RNA coding for a polypeptide of the present invention is cleaved by a catalytic RNA, or ribozyme, specific for such RNA. The ribozyme is expressed in transgenic plants and results in reduced amounts of RNA coding for the polypeptide of the present invention in plant cells, thus leading to reduced amounts of polypeptide accumulated in the cells. This method is further illustrated in U.S. Pat. No. 4,987,071.

[0414] (5) Dominant-Negative Mutants

[0415] In another preferred embodiment, the activity of the polypeptide encoded by the nucleotide sequences of this invention is changed. This is achieved by expression of dominant negative mutants of the proteins in transgenic plants, leading to the loss of activity of the endogenous protein.

[0416] (6) Aptamers

[0417] In a further embodiment, the activity of polypeptide of the present invention is inhibited by expressing in transgenic plants nucleic acid ligands, so-called aptamers, which specifically bind to the protein. Aptamers are preferentially obtained by the SELEX (Systematic Evolution of Ligands by EXponential Enrichment) method. In the SELEX method, a candidate mixture of single stranded nucleic acids having regions of randomized sequence is contacted with the protein and those nucleic acids having an increased affinity to the target are partitioned from the remainder of the candidate mixture. The partitioned nucleic acids are amplified to yield a ligand enriched mixture. After several iterations a nucleic acid with optimal affinity to the polypeptide is obtained and is used for expression in transgenic plants. This method is further illustrated in U.S. Pat. No. 5,270,163.

[0418] (7) Zinc Finger Proteins

[0419] A zinc finger protein that binds a nucleotide sequence of the present invention or to its regulatory region is also used to alter expression of the nucleotide sequence. Preferably, transcription of the nucleotide sequence is reduced or increased. Zinc finger proteins are for example described in Beerli et al., Proc. Natl. Acad. Sci. USA, 95:14628, 1998 or in WO 95/19431, WO 98/54311, or WO 96/06166.

[0420] (8) dsRNA

[0421] Alteration of the expression of a nucleotide sequence of the present invention is also obtained by dsRNA interference as described for example in WO 99/32619, WO 99/53050 or WO 99/61631.

[0422] (9) Insertion of a DNA Molecule (Insertional Mutagenesis)

[0423] In another preferred embodiment, a DNA molecule is inserted into a chromosomal copy of a nucleotide sequence of the present invention, or into a regulatory region thereof. Preferably, such DNA molecule comprises a transposable element capable of transposition in a plant cell, such as e.g. Ac/Ds, Em/Spm, mutator. Alternatively, the DNA molecule comprises a T-DNA border of an Agrobacterium T-DNA. The DNA molecule may also comprise a recombinase or integrase recognition site which can be used to remove part of the DNA molecule from the chromosome of the plant cell. An example of this method is set forth in the examples. Methods of insertional mutagenesis using T-DNA, transposons, oligonucleotides or other methods known to those skilled in the art are also encompassed. Methods of using T-DNA and transposon for insertional mutagenesis are described in Winkler et al., Methods Mol. Biol. 82:129, 1989 and Martienssen, Proc Natl. Acad. Sci. USA, 95:2021, 1998.

[0424] (10) Deletion mutagenesis

[0425] In yet another embodiment, a mutation of a nucleic acid molecule of the present invention is created in the genomic copy of the sequence in the cell or plant by deletion of a portion of the nucleotide sequence or regulator sequence. Methods of deletion mutagenesis are known to those skilled in the art. See, for example, Miao et al.,

[0426] Plant J., 7:359, 1995.

[0427] In yet another embodiment, this deletion is created at random in a large population of plants by chemical mutagenesis or irradiation and a plant with a deletion in a gene of the present invention is isolated by forward or reverse genetics. Irradiation with fast neutrons or gamma rays is known to cause deletion mutations in plants (Silverstone et al., Plant Cell, 10:155, 1998; Bruggemann et al., Plant J., 10:755, 1996; Redei and Koncz in Methods in Arabidopsis Research, World Scientific Press, pp. 16-82, 1992). Deletion mutations in a gene of the present invention can be recovered in a reverse genetics strategy using PCR with pooled sets of genomic DNAs as has been shown in C. elegans (Liu et al., Genome Res., 9:859, 1999.). A forward genetics strategy would involve mutagenesis of a line displaying PTGS followed by screening the M2 progeny for the absence of PTGS. Among these mutants would be expected to be some that disrupt a gene of the present invention. This could be assessed by Southern blot or PCR for a gene of the present invention with genomic DNA from these mutants.

[0428] (11) Overexpression in a Plant Cell

[0429] In yet another preferred embodiment, a nucleotide sequence of the present invention encoding a polypeptide comprising a 3′-5′ exonuclease domain and/or activity in a plant cell is overexpressed. Examples of nucleic acid molecules and expression cassettes for overexpression of a nucleic acid molecule of the present invention are described above. Methods known to those skilled in the art of over-expression of nucleic acid molecules are also encompassed by the present invention.

[0430] In still another embodiment, the expression of the nucleotide sequence of the present invention is altered in every cell of a plant. This is, for example, obtained though homologous recombination or by insertion in the chromosome. This is also, for example, obtained by expressing a sense or antisense RNA, zinc finger protein or ribozyme under the control of a promoter capable of expressing the sense or antisense RNA, zinc finger protein or ribozyme in every cell of a plant. Constitutive expression, inducible, tissue-specific or developmentally-regulated expression are also within the scope of the present invention and result in a constitutive, inducible, tissue-specific or developmentally-regulated alteration of the expression of a nucleotide sequence of the present invention in the plant cell. Constructs for expression of the sense or antisense RNA, zinc finger protein or ribozyme, or for overexpression of a nucleotide sequence of the present invention, are prepared and transformed into a plant cell according to the teachings of the present invention, e.g. as described infra.

[0431] The invention hence also provides sense and anti-sense nucleic acid molecules corresponding to the open reading frames identified in the SEQ ID NOs of the Sequence Lisitng as well as their orthologs.

[0432] The genes and open reading frames according to the present invention which are substantially similar to a nucleotide sequence encoding a polypeptide as given in any one of the SEQ ID NOs of the Sequence Lisiting including any corresponding anti-sense constructs can be operably linked to any promoter that is functional within the plant host including the promoter sequences according to the invention or mutants thereof.

[0433] The present invention further provides a method of augmenting a plant genome by contacting plant cells with a nucleic acid molecule of the invention, e.g., one having a nucleotide sequence that directs tissue-specific, tissue-preferential and/or mycorrhizal fungi- or phosphate-induced transcription of a linked nucleic acid segment isolatable or obtained from a plant gene encoding a polypeptide that is substantially similar to a polypeptide encoded by the an Oryza gene having a sequence according to any one of SEQ ID NOs provided in the Sequence Listing so as to yield transformed plant cells; and regenerating the transformed plant cells to provide a differentiated transformed plant, wherein the differentiated transformed plant expresses the nucleic acid molecule in the cells of the plant, preferably in the appropriate tissues of the plant grain. The nucleic acid molecule may be present in the nucleus, chloroplast, mitochondria and/or plastid of the cells of the plant.

[0434] Plant species may be transformed with the DNA construct of the present invention by the DNA-mediated transformation of plant cell protoplasts and subsequent regeneration of the plant from the transformed protoplasts in accordance with procedures well known in the art.

[0435] Any plant tissue capable of subsequent clonal propagation, whether by organogenesis or embryogenesis, may be transformed with a vector of the present invention. The term “organogenesis,” as used herein, means a process by which shoots and roots are developed sequentially from meristematic centers; the term “embryogenesis,” as used herein, means a process by which shoots and roots develop together in a concerted fashion (not sequentially), whether from somatic cells or gametes. The particular tissue chosen will vary depending on the clonal propagation systems available for, and best suited to, the particular species being transformed. Exemplary tissue targets include leaf disks, pollen, embryos, cotyledons, hypocotyls, megagametophytes, callus tissue, existing meristematic tissue (e.g., apical meristems, axillary buds, and root meristems), and induced meristem tissue (e.g., cotyledon meristem and ultilane meristem).

[0436] Plants of the present invention may take a variety of forms. The plants may be chimeras of transformed cells and non-transformed cells; the plants may be clonal transformants (e.g., all cells transformed to contain the expression cassette); the plants may comprise grafts of transformed and untransformed tissues (e.g., a transformed root stock grafted to an untransformed scion in citrus species). The transformed plants may be propagated by a variety of means, such as by clonal propagation or classical breeding techniques. For example, first generation (or TI) transformed plants may be selfed to give homozygous second generation (or T2) transformed plants, and the T2 plants further propagated through classical breeding techniques. A dominant selectable marker (such as npt II) can be associated with the expression cassette to assist in breeding.

[0437] Thus, the present invention provides a transformed (transgenic) plant cell, in planta or explanta, including a transformed plastid or other organelle, e.g., nucleus, mitochondria or chloroplast. The present invention may be used for transformation of any plant species, including, but not limited to, cells from corn (Zea mays), Brassica sp. (e.g., B. napus, B. rapa, B. juncea), particularly those Brassica species useful as sources of seed oil, alfalfa (Medicago sativa), rice (Oryza sativa), rye (Secale cereale), sorghum (Sorghum bicolor, Sorghum vulgare), millet (e.g., pearl millet (Pennisetum glaucum), proso millet (Panicum miliaceum), foxtail millet (Setaria italica), finger millet (Eleusine coracana)), sunflower (Helianthus annuus), safflower (Carthamus tinctorius), wheat (Triticum aestivum), soybean (Glycine max), tobacco (Nicotiana tabacum), potato (Solanum tuberosum), peanuts (Arachis hypogaea), cotton (Gossypium barbadense, Gossypium hirsutum), sweet potato (Ipomoea batatus), cassaya (Manihot esculenta), coffee (Cofea spp.), coconut (Cocos nucifera), pineapple (Ananas comosus), citrus trees (Citrus spp.), cocoa (Theobroma cacao), tea (Camellia sinensis), banana (Musa spp.), avocado (Persea ultilane), fig (Ficus casica), guava (Psidium guajava), mango (Mangifera indica), olive (Olea europaea), papaya (Carica papaya), cashew (Anacardium occidentale), macadamia (Macadamia integrifolia), almond (Prunus amygdalus), sugar beets (Beta vulgaris), sugarcane (Saccharum spp.), oats, duckweed (Lemna), barley, vegetables, ornamentals, and conifers.

[0438] Duckweed (Lemna, see WO 00/07210) includes members of the family Lemnaceae. There are known four genera and 34 species of duckweed as follows: genus Lemna (L. aequinoctialis, L. disperma, L. ecuadoriensis, L. gibba, L. japonica, L. minor, L. miniscula, L. obscura, L. perpusilla, L. tenera, L. trisulca, L. turionifera, L. valdiviana); genus Spirodela (S. intermedia, S. polyrrhiza, S. punctata); genus Woffia (Wa. Angusta, Wa. Arrhiza, Wa. Australina, Wa. Borealis, Wa. Brasiliensis, Wa. Columbiana, Wa. Elongata, Wa. Globosa, Wa. Microscopica, Wa. Neglecta) and genus Wofiella (Wl. ultila, Wl. ultilanen, Wl. gladiata, Wl. ultila, Wl. lingulata, Wl. repunda, Wl. rotunda, and Wl. neotropica). Any other genera or species of Lemnaceae, if they exist, are also aspects of the present invention. Lemna gibba, Lemnaminor, and Lemna miniscula are preferred, with Lemnaminor and Lemna miniscula being most preferred. Lemna species can be classified using the taxonomic scheme described by Landolt, Biosystematic Investigation on the Family of Duckweeds: The family of Lemnaceae—A Monograph Study. Geobatanischen Institut ETH, Stiftung Rubel, Zurich (1986)).

[0439] Vegetables within the scope of the invention include tomatoes (Lycopersicon esculentum), lettuce (e.g., Lactuca sativa), green beans (Phaseolus vulgaris), lima beans (Phaseolus limensis), peas (Lathyrus spp.), and members of the genus Cucumis such as cucumber (C. sativus), cantaloupe (C. cantalupensis), and musk melon (C. melo). Ornamentals include azalea (Rhododendron spp.), hydrangea (Macrophylla hydrangea), hibiscus (Hibiscus rosasanensis), roses (Rosa spp.), tulips (Tulipa spp.), daffodils (Narcissus spp.), petunias (Petunia hybrida), carnation (Dianthus caryophyllus), poinsettia (Euphorbia pulcherrima), and chrysanthemum. Conifers that may be employed in practicing the present invention include, for example, pines such as loblolly pine (Pinus taeda), slash pine (Pinus elliotii), ponderosa pine (Pinus ponderosa), lodgepole pine (Pinus contorta), and Monterey pine (Pinus radiata), Douglas-fir (Pseudotsuga menziesii); Western hemlock (Tsuga ultilane); Sitka spruce (Picea glauca); redwood (Sequoia sempervirens); true firs such as silver fir (Abies amabilis) and balsam fir (Abies balsamea); and cedars such as Western red cedar (Thuja plicata) and Alaska yellow-cedar (Chamaecyparis nootkatensis). Leguminous plants include beans and peas. Beans include guar, locust bean, fenugreek, soybean, garden beans, cowpea, mungbean, lima bean, fava bean, lentils, chickpea, etc. Legumes include, but are not limited to, Arachis, e.g., peanuts, Vicia, e.g., crown vetch, hairy vetch, adzuki bean, mung bean, and chickpea, Lupinus, e.g., lupine, trifolium, Phaseolus, e.g., common bean and lima bean, Pisum, e.g., field bean, Melilotus, e.g., clover, Medicago, e.g., alfalfa, Lotus, e.g., trefoil, lens, e.g., lentil, and false indigo. Preferred forage and turf grass for use in the methods of the invention include alfalfa, orchard grass, tall fescue, perennial ryegrass, creeping bent grass, and redtop.

[0440] Other plants within the scope of the invention include Acacia, aneth, artichoke, arugula, blackberry, canola, cilantro, clementines, escarole, eucalyptus, fennel, grapefruit, honey dew, jicama, kiwifruit, lemon, lime, mushroom, nut, okra, orange, parsley, persimmon, plantain, pomegranate, poplar, radiata pine, radicchio, Southern pine, sweetgum, tangerine, triticale, vine, yams, apple, pear, quince, cherry, apricot, melon, hemp, buckwheat, grape, raspberry, chenopodium, blueberry, nectarine, peach, plum, strawberry, watermelon, eggplant, pepper, cauliflower, Brassica, e.g., broccoli, cabbage, ultilan sprouts, onion, carrot, leek, beet, broad bean, celery, radish, pumpkin, endive, gourd, garlic, snapbean, spinach, squash, turnip, ultilane, and zucchini.

[0441] Ornamental plants within the scope of the invention include impatiens, Begonia, Pelargonium, Viola, Cyclamen, Verbena, Vinca, Tagetes, Primula, Saint Paulia, Agertum, Amaranthus, Antihirrhinum, Aquilegia, Cineraria, Clover, Cosmo, Cowpea, Dahlia, Datura, Delphinium, Gerbera, Gladiolus, Gloxinia, Hippeastrum, Mesembryanthemum, Salpiglossos, and Zinnia. Other plants within the scope of the invention are shown in Table 1 (above).

[0442] Preferably, transgenic plants of the present invention are crop plants and in particular cereals (for example, corn, alfalfa, sunflower, rice, Brassica, canola, soybean, barley, soybean, sugarbeet, cotton, safflower, peanut, sorghum, wheat, millet, tobacco, etc.), and even more preferably corn, rice and soybean.

[0443] The present invention also provides a transgenic plant prepared by this method, a seed from such a plant and progeny plants from such a plant including hybrids and inbreds. Preferred transgenic plants are transgenic maize, soybean, barley, alfalfa, sunflower, canola, soybean, cotton, peanut, sorghum, tobacco, sugarbeet, rice, wheat, rye, turfgrass, millet, sugarcane, tomato, or potato.

[0444] A transformed (transgenic) plant of the invention includes plants, the genome of which is augmented by a nucleic acid molecule of the invention, or in which the corresponding gene has been disrupted, e.g., to result in a loss, a decrease or an alteration, in the function of the product encoded by the gene, which plant may also have increased yields and/or produce a better-quality product than the corresponding wild-type plant. The nucleic acid molecules of the invention are thus useful for targeted gene disruption, as well as markers and probes.

[0445] The invention also provides a method of plant breeding, e.g., to prepare a crossed fertile transgenic plant. The method comprises crossing a fertile transgenic plant comprising a particular nucleic acid molecule of the invention with itself or with a second plant, e.g., one lacking the particular nucleic acid molecule, to prepare the seed of a crossed fertile transgenic plant comprising the particular nucleic acid molecule. The seed is then planted to obtain a crossed fertile transgenic plant. The plant may be a monocot or a dicot. In a particular embodiment, the plant is a cereal plant.

[0446] The crossed fertile transgenic plant may have the particular nucleic acid molecule inherited through a female parent or through a male parent. The second plant may be an inbred plant. The crossed fertile transgenic may be a hybrid. Also included within the present invention are seeds of any of these crossed fertile transgenic plants.

[0447] Transformation of plants can be undertaken with a single DNA molecule or multiple DNA molecules (i.e., co-transformation), and both these techniques are suitable for use with the expression cassettes of the present invention. Numerous transformation vectors are available for plant transformation, and the expression cassettes of this invention can be used in conjunction with any such vectors. The selection of vector will depend upon the preferred transformation technique and the target species for transformation.

[0448] A variety of techniques are available and known to those skilled in the art for introduction of constructs into a plant cell host. These techniques generally include transformation with DNA employing A. tumefaciens or A. rhizogenes as the transforming agent, liposomes, PEG precipitation, electroporation, DNA injection, direct DNA uptake, microprojectile bombardment, particle acceleration, and the like (See, for example, EP 295959 and EP 138341) (see below). However, cells other than plant cells may be transformed with the expression cassettes of the invention. The general descriptions of plant expression vectors and reporter genes, and Agrobacterium and Agrobacterium-mediated gene transfer, can be found in Gruber et al., Vectorsfor Plant Transformation, in Methods in Plant Molecular Biology, Glich et al., eds, pp. 89-119, CRC Press, 1993.

[0449] Expression vectors containing genomic or synthetic fragments can be introduced into protoplasts or into intact tissues or isolated cells. Preferably expression vectors are introduced into intact tissue. General methods of culturing plant tissues are provided for example by Maki et al., Methods in Plant Molecular Biology, Glich et al., eds, pp. 67-88, CRC Press, 1993; and by Phillips et al. in Corn and Corn Improvement, 3d ed, Sprague et al., eds., Amer. Soc of Agronomy, 1988. Preferably, expression vectors are introduced into maize or other plant tissues using a direct gene transfer method such as microprojectile-mediated delivery, DNA injection, electroporation and the like. More preferably expression vectors are introduced into plant tissues using the microprojectile media delivery with the biolistic device. See, for example, Tomes et al., Plant Cell, Tissue and Organ Culture: Fundamental Methods, Springer-Verlag, 1995. The vectors of the invention can not only be used for expression of structural genes but may also be used in exon-trap cloning, or promoter trap procedures to detect differential gene expression in varieties of tissues, (Lindsey et al., Transgen. Res., 2:3347, 1993; Auch & Reth et al., Nuc. Acids Res., 18:6743, 1990).

[0450] It is particularly preferred to use the binary type vectors of Ti and Ri plasmids of Agrobacterium spp. Ti-derived vectors transform a wide variety of higher plants, including monocotyledonous and dicotyledonous plants, such as soybean, cotton, rape, tobacco, and rice (Pacciotti et al., Bio/Technology, 3:241, 1985: Byrne et al., Plant Cell Tissue Org Culture, 8:3, 1987; Sukhapinda et al., Plant Mol. Biol., 8:209, 1987; Lorz et al., Mol. Gen. Genet., 199:178, 1985; Potrykus, Trends Biotech., 7:269 1985; Park et al., J. Plant Biol., 38:365, 1985: Hiei et al., Plant J., 6:271, 1994). The use of T-DNA to transform plant cells has received extensive study and is amply described (EP 120516; Hoekema, in The Binary Plant Vector System, Offset-drukkcrij Kanters B. V., 1985; Knauf, et al., Analysis ofHost Range Expression by Agrobacterium, in Molecular Genetics of the Bacteria-Plant Interaction, Puhler, ed., Springer-Verlag, 1983; and An et al., EMBO J, 4:277, 1985). For introduction into plants, the chimeric genes of the invention can be inserted into binary vectors as described in the examples.

[0451] Other transformation methods are available to those skilled in the art, such as direct uptake of foreign DNA constructs (see EP 295959), techniques of electroporation (Fromm et al., Nature, 319:791 1986) or high velocity ballistic bombardment with metal particles coated with the nucleic acid constructs (Kline et al., Nature, 327:70, 1987, and U.S. Pat. No. 4,945,050). Once transformed, the cells can be regenerated by those skilled in the art. Of particular relevance are the recently described methods to transform foreign genes into commercially important crops, such as rapeseed (De Block et al., Plant Physiol., 91:694, 1989), sunflower (Everett et al., Bio/Technology, 5:1201, 1987), soybean (McCabe et al., Bio/Technology, 6:923, 1988; Hinchee et al., Bio/Technology, 6:915, 1988; Chee et al., Plant Physiol., 91:1212, 1989; Christou et al., Proc. Natl. Acad. Sci. USA, 86:7500, 1989; EP 301749), rice (Hiei et al., Plant J., 6:271, 1994), and corn (Gordon Kamm et al., Plant Cell, 2:603, 1990; Fromm et al., Bio/Technology, 8:833, 1990).

[0452] Those skilled in the art will appreciate that the choice of method might depend on the type of plant, i.e., monocotyledonous or dicotyledonous, targeted for transformation. Suitable methods of transforming plant cells include, but are not limited to, microinjection (Crossway et al., Bio/Techniques, 4:320, 1986), electroporation (Riggs et al., Proc. Natl. Acad. Sci. USA, 83:5602, 1986), Agrobacterium-mediated transformation (Hinchee et al., Bio/Technology, 6:915, 1988), direct gene transfer (Paszkowski et al., EMBO J, 3:2717, 1984), and ballistic particle acceleration using devices available from Agracetus, Inc., Madison, Wis. And BioRad, Hercules, Calif. (see, for example, Sanford et al., U.S. Pat. No. 4,945,050; and McCabe et al., Bio/Technology, 6:923, 1988). Also see, Weissinger et al., Ann. Rev. Genet., 22:421, 1988; Sanford et al., Particulate Sci. Tech., 5:27, 1987 (onion); Christou et al., Plant Physiol, 87:671, 1988 (soybean); McCabe et al., Bio/Technology, 6:923, 1988 (soybean); Datta et al., Bio/Technology, 8:736, 1990 (rice); Klein et al., Bio/Technology, 6:559, 1988 (maize); Klein et al., 1988 (maize); Klein et al., 1988 (maize); Fromm et al., Bio/Technology, 8:833, 1990 (maize); and Gordon-Kamm et al., Plant Cell, 2:603, 1990 (maize); Svab et al., Proc. Natl. Acad. Sci. USA, 87:8526, 1990 (tobacco chloroplast); Koziel et al., Biotechnology, 11:194, 1993 (maize); Shimamoto et al., Nature, 338:274, 1989 (rice); Christou et al., Biotechnology, 9:957, 1991 (rice); European Patent Application EP 0 332 581 (orchardgrass and other Pooideae); Vasil et al., Biotechnology, 11: 1553, 1993 (wheat); Weeks et al., Plant Physiol., 102:1077, 1993 (wheat). In one embodiment, the protoplast transformation method for maize is employed (European Patent Application EP 0 292 435, U.S. Pat. No. 5,350,689).

[0453] In another embodiment, a nucleotide sequence of the present invention is directly transformed into the plastid genome. Plastid transformation technology is extensively described in U.S. Pat. Nos. 5,451,513, 5,545,817, and 5,545,818, in PCT application no. WO 95/16783, and in McBride et al., Proc. Natl. Acad. Sci. USA, 91:7301, 1994. The basic technique for chloroplast transformation involves introducing regions of cloned plastid DNA flanking a selectable marker together with the gene of interest into a suitable target tissue, e.g., using biolistics or protoplast transformation (e.g., calcium chloride or PEG mediated transformation). The 1 to 1.5 kb flanking regions, termed targeting sequences, facilitate orthologous recombination with the plastid genome and thus allow the replacement or modification of specific regions of the plastome. Initially, point mutations in the chloroplast 16S rRNA and rps12 genes conferring resistance to spectinomycin and/or streptomycin are utilized as selectable markers for transformation (Svab et al., Proc. Natl. Acad. Sci. USA, 87:8526, 1990; Staub et al., Plant Cell, 4:39, 1992). This resulted in stable homoplasmic transformants at a frequency of approximately one per 100 bombardments of target leaves. The presence of cloning sites between these markers allowed creation of a plastid targeting vector for introduction of foreign genes (Staub et al., EMBO J., 12:601, 1993). Substantial increases in transformation frequency are obtained by replacement of the recessive rRNA or r-protein antibiotic resistance genes with a dominant selectable marker, the bacterial aadA gene encoding the spectinomycin-detoxifying enzyme aminoglycoside-3N-adenyltransferase (Svab et al., EMBO J., 12:601, 1993). Other selectable markers useful for plastid transformation are known in the art and encompassed within the scope of the invention. Typically, approximately 15-20 cell division cycles following transformation are required to reach a homoplastidic state. Plastid expression, in which genes are inserted by orthologous recombination into all of the several thousand copies of the circular plastid genome present in each plant cell, takes advantage of the enormous copy number advantage over nuclear-expressed genes to permit expression levels that can readily exceed 10% of the total soluble plant protein. In a preferred embodiment, a nucleotide sequence of the present invention is inserted into a plastid targeting vector and transformed into the plastid genome of a desired plant host. Plants homoplastic for plastid genomes containing a nucleotide sequence of the present invention are obtained, and are preferentially capable of high expression of the nucleotide sequence.

[0454] Agrobacterium tumefaciens cells containing a vector comprising an expression cassette of the present invention, wherein the vector comprises a Ti plasmid, are useful in methods of making transformed plants. Plant cells are infected with an Agrobacterium tumefaciens as described above to produce a transformed plant cell, and then a plant is regenerated from the transformed plant cell. Numerous Agrobacterium vector systems useful in carrying out the present invention are known.

[0455] For example, vectors are available for transformation using Agrobacterium tumefaciens. These typically carry at least one T-DNA border sequence and include vectors such as pBIN19 (Bevan, Nuc. Acids Res., 12:8711, 1984). In one preferred embodiment, the expression cassettes of the present invention may be inserted into either of the binary vectors pCIB200 and pCIB2001 for use with Agrobacterium. These vector cassettes for Agrobacterium-mediated transformation were constructed in the following manner. PTJS75kan was created by NarI digestion of pTJS75 (Schmidhauser & Helinski, J. Bacteriol., 164:446, 1985) allowing excision of the tetracycline-resistance gene, followed by insertion of an AccI fragment from pUC4K carrying an NPTII (Messing & Vierra, Gene, 19:259, 1982; Bevan et al., Nature, 304:184, 1983; McBride et al., Plant Mol. Biol., 14:266, 1990). XhoI linkers are ligated to the EcoRV fragment of pCIB7 which contains the left and right T-DNA borders, a plant selectable nos/nptll chimeric gene and the pUC polylinker (Rothstein et al., Gene, 53:153, 1987), and the XhoI-digested fragment was cloned into SalI-digested pTJS75kan to create pCIB200 (see also EP 0 332 104, example 19). PCIB200 contains the following unique polylinker restriction sites: EcoRI, SstI, KpnI, BglII, XbaI, and SalI. The plasmid pCIB2001 is a derivative of pCIB200 which was created by the insertion into the polylinker of additional restriction sites. Unique restriction sites in the polylinker of pCIB2001 are EcoRI, SstI, KpnI, BglII, XbaI, SalI, MluI, BclI, AvrII, ApaI, HpaI, and Stul. PCIB2001, in addition to containing these unique restriction sites also has plant and bacterial kanamycin selection, left and right T-DNA borders for Agrobacterium-mediated transformation, the RK2-derived trfA function for mobilization between E. coli and other hosts, and the OriT and OriV functions also from RK2. The pCIB2001 polylinker is suitable for the cloning of plant expression cassettes containing their own regulatory signals.

[0456] An additional vector useful for Agrobacterium-mediated transformation is the binary vector pCIB 10, which contains a gene encoding kanamycin resistance for selection in plants, T-DNA right and left border sequences and incorporates sequences from the wide host-range plasmid pRK252 allowing it to replicate in both E. coli and Agrobacterium. Its construction is described by Rothstein et al., Gene, 53:153, 1987. Various derivatives of pCIB10 have been constructed which incorporate the gene for hygromycin B phosphotransferase described by Gritz et al., Gene, 25:179, 1983. These derivatives enable selection of transgenic plant cells on hygromycin only (pCIB743), or hygromycin and kanamycin (pCIB715, pCIB717).

[0457] Methods using either a form of direct gene transfer or Agrobacterium-mediated transfer usually, but not necessarily, are undertaken with a selectable marker which may provide resistance to an antibiotic (e.g., kanamycin, hygromycin or methotrexate) or a herbicide (e.g., phosphinothricin). The choice of selectable marker for plant transformation is not, however, critical to the invention.

[0458] For certain plant species, different antibiotic or herbicide selection markers may be preferred. Selection markers used routinely in transformation include the nptll gene which confers resistance to kanamycin and related antibiotics (Messing & Vierra, Gene, 19:259, 1982; Bevan et al., Nature, 304:184, 1983), the bar gene which confers resistance to the herbicide phosphinothricin (White et al., Nuc. Acids Res., 18:1062, 1990, Spencer et al., Theor. Appl. Genet., 79:625, 1990), the hph gene which confers resistance to the antibiotic hygromycin (Blochinger & Diggelmann Mol. Cell. Biol., 4:2929, 1984), and the dhfr gene, which confers resistance to methotrexate (Bourouis et al., EMBO J. 2:1099 1983).

[0459] Selection markers resulting in positive selection, such as a phosphomannose isomerase gene, as described in patent application WO 93/05163, are also used. Other genes to be used for positive selection are described in WO 94/20627 and encode xyloisomerases and phosphomanno-isomerases such as mannose-6-phosphate isomerase and mannose-1-phosphate isomerase; phosphomanno mutase; mannose epimerases such as those which convert carbohydrates to mannose or mannose to carbohydrates such as glucose or galactose; phosphatases such as mannose or xylose phosphatase, mannose-6-phosphatase and mannose-1-phosphatase, and permeases which are involved in the transport of mannose, or a derivative, or a precursor thereof into the cell. The agent which reduces the toxicity of the compound to the cells is typically a glucose derivative such as methyl-3-O-glucose or phloridzin. Transformed cells are identified without damaging or killing the non-transformed cells in the population and without co-introduction of antibiotic or herbicide resistance genes. As described in WO 93/05163, in addition to the fact that the need for antibiotic or herbicide resistance genes is eliminated, it has been shown that the positive selection method is often far more efficient than traditional negative selection.

[0460] One vector useful for direct gene transfer techniques in combination with selection by the herbicide Basta (or phosphinothricin) is pCIB3064. This vector is based on the plasmid pCIB246, which comprises the CaMV ³⁵S promoter in operational fusion to the E. coli GUS gene and the CaMV ³⁵S transcriptional terminator and is described in the PCT published application WO 93/07278. One gene useful for conferring resistance to phosphinothricin is the bar gene from Streptomyces viridochromogenes (Thompson et al., EMBO J., 6:2519, 1987). This vector is suitable for the cloning of plant expression cassettes containing their own regulatory signals.

[0461] An additional transformation vector is pSOG35 which utilizes the E. coli gene dihydrofolate reductase (DHFR) as a selectable marker conferring resistance to methotrexate. PCR was used to amplify the ³⁵S promoter (about 800 bp), intron 6 from the maize Adh1 gene (about 550 bp) and 18 bp of the GUS untranslated leader sequence from pSOG10. A 250 bp fragment encoding the E. coli dihydrofolate reductase type II gene was also amplified by PCR and these two PCR fragments are assembled with a SacI-PstI fragment from pBI221 (Clontech) which comprised the pUC19 vector backbone and the nopaline synthase terminator. Assembly of these fragments generated pSOG19 which contains the ³⁵S promoter in fusion with the intron 6 sequence, the GUS leader, the DHFR gene and the nopaline synthase terminator. Replacement of the GUS leader in pSOG19 with the leader sequence from Maize Chlorotic Mottle Virus check (MCMV) generated the vector pSOG35. pSOG19 and pSOG35 carry the pUC-derived gene for ampicillin resistance and have HindIII, SphI, PstI and EcoRI sites available for the cloning of foreign sequences.

[0462] Binary backbone vector pNOV2117 contains the T-DNA portion flanked by the right and left border sequences, and including the Positech™ (Syngenta) plant selectable marker and the “candidate gene” gene expression cassette. The Positech™ plant selectable marker confers resistance to mannose and in this instance consists of the maize ubiquitin promoter driving expression of the PMI (phosphomannose isomerase) gene, followed by the cauliflower mosaic virus transcriptional terminator.

[0463] Transgenic plant cells are then placed in an appropriate selective medium for selection of transgenic cells which are then grown to callus. Shoots are grown from callus and plantlets generated from the shoot by growing in rooting medium. The various constructs normally will be joined to a marker for selection in plant cells. Conveniently, the marker may be resistance to a biocide (particularly an antibiotic, such as kanamycin, G418, bleomycin, hygromycin, chloramphenicol, herbicide, or the like). The particular marker used will allow for selection of transformed cells as compared to cells lacking the DNA which has been introduced. Components of DNA constructs including transcription cassettes of this invention may be prepared from sequences which are native (endogenous) or foreign (exogenous) to the host. By “foreign” it is meant that the sequence is not found in the wild-type host into which the construct is introduced. Heterologous constructs will contain at least one region which is not native to the gene from which the transcription-initiation-region is derived.

[0464] To confirm the presence of the transgenes in transgenic cells and plants, a variety of assays may be performed. Such assays include, for example, “molecular biological” assays well known to those of skill in the art, such as Southern and Northern blotting, in situ hybridization and nucleic acid-based amplification methods such as PCR or RT-PCR; “biochemical” assays, such as detecting the presence of a protein product, e.g., by immunological means (ELISAs and Western blots) or by enzymatic function; plant part assays, such as seed assays; and also, by analyzing the phenotype of the whole regenerated plant, e.g., for disease or pest resistance.

[0465] DNA may be isolated from cell lines or any plant parts to determine the presence of the preselected nucleic acid segment through the use of techniques well known to those skilled in the art. Note that intact sequences will not always be present, presumably due to rearrangement or deletion of sequences in the cell.

[0466] The presence of nucleic acid elements introduced through the methods of this invention may be determined by polymerase chain reaction (PCR). Using this technique discreet fragments of nucleic acid are amplified and detected by gel electrophoresis. This type of analysis permits one to determine whether a preselected nucleic acid segment is present in a stable transformant, but does not prove integration of the introduced preselected nucleic acid segment into the host cell genome. In addition, it is not possible using PCR techniques to determine whether transformants have exogenous genes introduced into different sites in the genome, i.e., whether transformants are of independent origin. It is contemplated that using PCR techniques it would be possible to clone fragments of the host genomic DNA adjacent to an introduced preselected DNA segment.

[0467] Positive proof of DNA integration into the host genome and the independent identities of transformants may be determined using the technique of Southern hybridization. Using this technique specific DNA sequences that are introduced into the host genome and flanking host DNA sequences can be identified. Hence the Southern hybridization pattern of a given transformant serves as an identifying characteristic of that transformant. In addition it is possible through Southern hybridization to demonstrate the presence of introduced preselected DNA segments in high molecular weight DNA, i.e., confirm that the introduced preselected DNA segment has been integrated into the host cell genome. The technique of Southern hybridization provides information that is obtained using PCR, e.g., the presence of a preselected DNA segment, but also demonstrates integration into the genome and characterizes each individual transformant.

[0468] It is contemplated that using the techniques of dot or slot blot hybridization which are modifications of Southern hybridization techniques one could obtain the same information that is derived from PCR, e.g., the presence of a preselected DNA segment.

[0469] Both PCR and Southern hybridization techniques can be used to demonstrate transmission of a preselected DNA segment to progeny. In most instances the characteristic Southern hybridization pattern for a given transformant will segregate in progeny as one or more Mendelian genes (Spencer et al., Theor. Appl. Genet., 79:625, 1992); Laursen et al., Plant Mol. Biol., 24:51, 1994) indicating stable inheritance of the gene. The nonchimeric nature of the callus and the parental transformants (Ro) was suggested by germline transmission and the identical Southern blot hybridization patterns and intensities of the transforming DNA in callus, R₀ plants and R₁ progeny that segregated for the transformed gene.

[0470] Whereas DNA analysis techniques may be conducted using DNA isolated from any part of a plant, RNA may only be expressed in particular cells or tissue types and hence it will be necessary to prepare RNA for analysis from these tissues. PCR techniques may also be used for detection and quantitation of RNA produced from introduced preselected DNA segments. In this application of PCR it is first necessary to reverse transcribe RNA into DNA, using enzymes such as reverse transcriptase, and then through the use of conventional PCR techniques amplify the DNA. In most instances PCR techniques, while useful, will not demonstrate integrity of the RNA product. Further information about the nature of the RNA product may be obtained by Northern blotting. This technique will demonstrate the presence of an RNA species and give information about the integrity of that RNA. The presence or absence of an RNA species can also be determined using dot or slot blot Northern hybridizations. These techniques are modifications of Northern blotting and will only demonstrate the presence or absence of an RNA species.

[0471] While Southern blotting and PCR may be used to detect the preselected DNA segment in question, they do not provide information as to whether the preselected DNA segment is being expressed. Expression may be evaluated by specifically identifying the protein products of the introduced preselected DNA segments or evaluating the phenotypic changes brought about by their expression.

[0472] Assays for the production and identification of specific proteins may make use of physical-chemical, structural, functional, or other properties of the proteins. Unique physical-chemical or structural properties allow the proteins to be separated and identified by electrophoretic procedures, such as native or denaturing gel electrophoresis or isoelectric focusing, or by chromatographic techniques such as ion exchange or gel exclusion chromatography. The unique structures of individual proteins offer opportunities for use of specific antibodies to detect their presence in formats such as an ELISA assay. Combinations of approaches may be employed with even greater specificity such as Western blotting in which antibodies are used to locate individual gene products that have been separated by electrophoretic techniques. Additional techniques may be employed to absolutely confirm the identity of the product of interest such as evaluation by amino acid sequencing following purification. Although these are among the most commonly employed, other procedures may be additionally used.

[0473] Assay procedures may also be used to identify the expression of proteins by their functionality, especially the ability of enzymes to catalyze specific chemical reactions involving specific substrates and products. These reactions may be followed by providing and quantifying the loss of substrates or the generation of products of the reactions by physical or chemical procedures. Examples are as varied as the enzyme to be analyzed.

[0474] Very frequently the expression of a gene product is determined by evaluating the phenotypic results of its expression. These assays also may take many forms including but not limited to analyzing changes in the chemical composition, morphology, or physiological properties of the plant. Morphological changes may include greater stature or thicker stalks. Most often changes in response of plants or plant parts to imposed treatments are evaluated under carefully controlled conditions termed bioassays.

[0475] The compositions of the invention include plant nucleic acid molecules, and the amino acid sequences for the polypeptides or partial-length polypeptides encoded by the nucleic acid molecule which comprises an open reading frame. These sequences can be employed to alter expression of a particular gene corresponding to the open reading frame by decreasing or eliminating expression of that plant gene or by overexpressing a particular gene product. Methods of this embodiment of the invention include stably transforming a plant with the nucleic acid molecule of the invention which includes an open reading frame operably linked to a promoter capable of driving expression of that open reading frame (sense or antisense) in a plant cell. By “portion” or “fragment”, as it relates to a nucleic acid molecule which comprises an open reading frame or a fragment thereof encoding a partial-length polypeptide having the activity of the full length polypeptide, is meant a sequence having at least 80 nucleotides, more preferably at least 150 nucleotides, and still more preferably at least 400 nucleotides. If not employed for expressing, a “portion” or “fragment” means at least 9, preferably 12, more preferably 15, even more preferably at least 20, consecutive nucleotides, e.g., probes and primers (oligonucleotides), corresponding to the nucleotide sequence of the nucleic acid molecules of the invention. Thus, to express a particular gene product, the method comprises introducing to a plant, plant cell, or plant tissue an expression cassette comprising a promoter linked to an open reading frame so as to yield a transformed differentiated plant, transformed cell or transformed tissue. Transformed cells or tissue can be regenerated to provide a transformed differentiated plant. The transformed differentiated plant or cells thereof preferably expresses the open reading frame in an amount that alters the amount of the gene product in the plant or cells thereof, which product is encoded by the open reading frame. The present invention also provides a transformed plant prepared by the method, progeny and seed thereof.

[0476] The invention further includes a nucleotide sequence which is complementary to one (hereinafter “test” sequence) which hybridizes under stringent conditions with a nucleic acid molecule of the invention as well as RNA which is transcribed from the nucleic acid molecule. When the hybridization is performed under stringent conditions, either the test or nucleic acid molecule of invention is preferably supported, e.g., on a membrane or DNA chip. Thus, either a denatured test or nucleic acid molecule of the invention is preferably first bound to a support and hybridization is effected for a specified period of time at a temperature of, e.g., between 55 and 70° C., in double strength citrate buffered saline (SC) containing 0.1% SDS followed by rinsing of the support at the same temperature but with a buffer having a reduced SC concentration. Depending upon the degree of stringency required such reduced concentration buffers are typically single strength SC containing 0.1% SDS, half strength SC containing 0.1% SDS and one-tenth strength SC containing 0.1% SDS.

[0477] In a further embodiment, the present invention provides a transformed plant host cell, or one obtained through breeding, capable of over-expressing, under-expressing, or having a knock out of amino acid genes and/or their gene products. The plant cell is transformed with at least one such expression vector wherein the plant host cell can be used to regenerate plant tissue or an entire plant, or seed there from, in which the effects of expression, including overexpression or underexpression, of the introduced sequence or sequences can be measured in vitro or in planta.

[0478] The invention will be further described by reference to the following detailed examples. These examples are provided for purposes of illustration only, and are not intended to be limiting unless otherwise specified.

### EXAMPLES

### Example 1

### Isolation and Sequencing of DNA Fragments

[0479] 1.1 Isolation and Sequencing of Genomic DNA Fragments

[0480] Genomic DNA is isolated from nuclei of Oryza sativa L. sspjaponica cv Nipponbare and then sheared to produce fragments of approximately 500 bp. Using a method derived from the method of Mao et al. (Genome Res 10:982 (2000)), seeds are germinated on cheese cloth immersed in water and grown for 4-6 weeks under greenhouse conditions. After plants reach a height of approximately 5-8 inches, the upper parts of the green leaves are harvested and wrapped in aluminum foil at 4° C. overnight. Leaf material is then stored at −80° C. or directly used for extraction of nuclei. Intact nuclei are isolated by homogenization (in a blender for fresh material or by grinding with mortar and pestle for frozen material) in a buffer containing 10 mM Trizma base, 80 mM KCl, 10 mM EDTA, 1 mM spermidine, 1 mM spermine, 0.5 M sucrose, 0.5% Triton-X-100, 0.15% β-mercaptoethanol pH 9.5. The homogenate is filtered and nuclei recovered by gentle centrifugation using a fixed-angle rotor at 1,800 g at 4° C. for 20 minutes. The pellet recovered after centrifugation is gently resuspended with the assistance of a small paint brush soaked in ice cold wash buffer and wash buffer added. Particulate matter remaining in the suspension is removed by filtering the resuspended nuclei into a 50 ml centrifuge tube through two layers of miracloth by gravity and centrifuging the filtrate at 57 g (500 rpm), 4° C. for 2 minutes to remove intact cells and tissue residues. The supernatant fluid is transferred into a fresh centrifuge tube and nuclei are pelleted by centrifugation at 1,800 g, 4° C. for 15 minutes in a swinging bucket centrifuge.

[0481] DNA is isolated from the nuclear preparation by phenol/chloroform extraction, as in Sambrook et al (supra). Isolated total genomic DNA is physically sheared (Hydroshear) to generate for generating random DNA fragments, and fragments of approximately 500 bp are recovered. DNA is eluted and the ends filled in using T₄ DNA polymerase, Klenow fragments, and dNTPs. Double-stranded DNA is linkered and cloned into a Novartis proprietary medium-copy vector derived from pSC101.

[0482] Vector inserts are amplified by PCR and sequenced using the MegaBACE sequencing system (Molecular Dynamics, Amersham). The amplification reaction is diluted before use and is not purified using an exonuclease/alkaline phosphatase procedure. Sequencing reactions are performed using DYEnamic ET Terminator Kit. The reactions contained approximately 50 ng of amplicon, DYEnamic ET Terminator premix, and 5 pmol of −40 M13 forward primer. The sequencing reaction is amplified for 30 cycles, and reaction products are concentrated and purified using ethanol precipitation. The sample is electrokinetically injected into the capillary at 3 kV for 45 sec and separated via electrophoresis at 9 kV for 120 min.

[0483] 1.2 Isolation and Sequencing of cDNA Fragments

[0484] Construction of rice cDNA library. Total RNA is purified from rice plant tissue using standard total RNA purification methods. PolyA+ RNA is isolated from the total RNA using the Qiagen Oligotex mRNA purification system (Qiagen, Valencia, Calif.), and cDNA is generated using cDNA synthesis reagents from Life Technologies (Rockville, Md.). First strand cDNA synthesis is catalyzed by reverse transcriptase using oligo dT primers with a NotI restriction site. Second strand synthesis is catalyzed by DNA polymerase. An oligonucleotide linker with a SalI restriction endonuclease site is attached to the 5′ end of the cDNAs using DNA ligase. The cDNAs are digested with NotI and SalI restriction endonucleases and inserted into an E. coli-replicating plasmid harboring a selectable marker. E. coli is transfected with the recombinant plasmids and grown on selectable media. E. coli colonies are individually picked off the selectable media and placed into storage plates.

[0485] Sequencing the rice cDNA library, The DNA sequence of the cDNA cloned into the plasmid purified from an E. coli colony is determined using standard dideoxy sequencing methods. Oligonucleotide primers respectively corresponding to plasmid DNA regions upstream of the 5′ end of the cDNA insert (Forward reaction) and downstream of the 3′ end of the cDNA insert (Reverse reaction) are used in the dideoxy sequencing reactions. If the DNA sequence determined as a result of the Forward and Reverse reactions from the cDNA overlapped, the two sequences could be merged into a contig using computerized analysis software (Consed, University of Washington, Seattle), to assemble a full-length sequence of the cDNA. In cases case where DNA sequence from the Forward and Reverse reactions from a single clone did not overlap sufficiently to be assembled into a contig, such that there is a region of unsequenced DNA to bridge the DNA from the Forward and Reverse reaction in order to form a contig, the DNA sequence of the separating region is determined using one of two dideoxy sequencing methods. In a “primer walking” approach, a primer specifically corresponding to the 3′ end of the DNA sequence determined from the Forward reaction is used in a second dedeoxy sequencing reaction. The primer walking procedure is repeated until the DNA sequence that separated the original Forward and Reverse is resolved and a contig could be assembled. Alternatively, the clone harboring the cDNA is subjected to transposon in vitro insertion dideoxysequencing (Epicentre, Madison, Wis.). In this procedure, the insertion process is random and the result is multiple DNA sequence coverage over the targeted cDNA, where the sequences thus obtained are assembled into a contig.

### Example 2

### Cloning and Sequence of Nucleic Acid Molecules from Rice

[0486] Primers designed based on the genomic sequence can be used to PCR amplify the full-length cDNA (start to stop codon) from first strand cDNA prepared from rice cultivar Nipponbare leaf tissue.

[0487] The PCR fragment is then cloned into pCR2.1-TOPO per the manufacturer's instructions (Invitrogen, Carlsbad, Calif.), and several individual clones are subjected to sequencing analysis.

[0488] DNA preps for 2-4 independent clones are miniprepped following the manufacturer's instructions (Qiagen, Valencia, Calif.). DNA is subjected to sequencing analysis using the BigDye™ Terminator Kit according to manufacturer's instructions (Applied Bioscience Inc., Foster City, Calif.). Sequencing makes use of primers designed to both strands of the predicted gene of interest. All sequencing data are analyzed and assembled using the Phred/Phrap/Consed software package (University of Washington) to an error ratio equal to or less than 10⁻⁴ at the consensus sequence level.

[0489] The consensus sequence from the sequencing analysis is then to be validated as being intact and the correct gene in several ways. The coding region is checked for being full length (predicted start and stop codons present) and uninterrupted (no internal stop codons). Alignment with the gene prediction and BLAST analysis is used to ascertain that this is in fact the right gene.

### Example 3

### Vector Construction for Overexpression and Gene “Knockout” Experiments

[0490] Overexpression

[0491] Vectors used for expression of full-length “candidate genes” of interest in plants (overexpression) are designed to overexpress the protein of interest and are of two general types, biolistic and binary, depending on the plant transformation method to be used.

[0492] For biolistic transformation (biolistic vectors), the requirements are as follows:

[0493] 1. a backbone with a bacterial selectable marker (typically, an antibiotic resistance gene) and origin of replication functional in Escherichia coli (E. coli; eg. ColE1), and

[0494] 2. a plant-specific portion comprising:

[0495] a. a gene expression cassette containing a promoter (eg. ZmUBlint MOD), the gene of interest (typically, a full-length cDNA) and a transcriptional terminator (eg. Agrobacterium tumefaciens nos terminator);

[0496] b. a plant selectable marker cassette, containing a promoter (eg. rice Act1D-BV MOD), selectable marker gene (eg. phosphomannose isomerase, PMI) and transcriptional terminator (eg. CaMV terminator).

[0497] Vectors designed for transformation by Agrobacterium tumefaciens (A. tumefaciens; binary vectors) comprise:

[0498] 1. a backbone with a bacterial selectable marker functional in both E. coli and A. tumefaciens (eg. spectinomycin resistance mediated by the aadA gene) and two origins of replication, functional in each of aforementioned bacterial hosts, plus the A. tumefaciens virG gene;

[0499] 2. a plant-specific portion as described for biolistic vectors above, except in this instance this portion is flanked by A. tumefaciens right and left border sequences which mediate transfer of the DNA flanked by these two sequences to the plant.

[0500] Knock Out Vectors

[0501] Vectors designed for reducing or abolishing expression of a single gene or of a family or related genes (knockout vectors) are also of two general types corresponding to the methodology used to downregulate gene expression: antisense or double-stranded RNA interference (dsRNAi).

[0502] Anti-Sense

[0503] For antisense vectors, a full-length or partial gene fragment (typically, a portion of the cDNA) can be used in the same vectors described for full-length expression, as part of the gene expression cassette. For antisense-mediated down-regulation of gene expression, the coding region of the gene or gene fragment will be in the opposite orientation relative to the promoter; thus, mRNA will be made from the non-coding (antisense) strand in planta.

[0504] dsRNAi

[0505] For dsRNAi vectors, a partial gene fragment (typically, 300 to 500 basepairs long) is used in the gene expression cassette, and is expressed in both the sense and antisense orientations, separated by a spacer region (typically, a plant intron, eg. the OsSH1 intron 1, or a selectable marker, eg. conferring kanamycin resistance). Vectors of this type are designed to form a double-stranded mRNA stem, resulting from the basepairing of the two complementary gene fragments in planta.

[0506] Biolistic or binary vectors designed for overexpression or knockout can vary in a number of different ways, including eg. the selectable markers used in plant and bacteria, the transcriptional terminators used in the gene expression and plant selectable marker cassettes, and the methodologies used for cloning in gene or gene fragments of interest (typically, conventional restriction enzyme-mediated or Gateway™ recombinase-based cloning). An important variant is the nature of the gene expression cassette promoter driving expression of the gene or gene fragment of interest in most tissues of the plants (constitutive, eg. ZmUBIint MOD), in specific plant tissues (eg. maize ADP-gpp for endosperm-specific expression), or in an inducible fashion (eg. GAL4bsBzl for estradiol-inducible expression in lines constitutively expressing the cognate transcriptional activator for this promoter).

### Example 4

### Insertion of a “Candidate Gene” Involved in Isoprenoid Biosynthesis into Expression Vector

[0507] A validated rice cDNA clone in pCR2.1-TOPO is subcloned using conventional restriction enzyme-based cloning into a vector, downstream of the maize ubiquitin promoter and intron, and upstream of the Agrobacterium tumefaciens nos 3′ end transcriptional terminator. The resultant gene expression cassette promoter, “candidate gene” and terminator) is further subcloned, using conventional restriction enzyme-based cloning, into the pNOV2117 binary vector, generating pNOVCANDiso.

[0508] The pNOVCANDiso binary vector is designed for transformation and over-expression of the “candidate gene” in monocots. It consists of a binary backbone containing the sequences necessary for selection and growth in Escherichia coli DH-5alpha (Invitrogen) and Agrobacterium tumefaciens LBA4404, including the bacterial spectinomycin antibiotic resistance aadA gene from E. coli transposon Tn7, origins of replication for E. coli (ColE1) and A. tumefaciens (VS 1), and the A. tumefaciens virG gene. In addition to the binary backbone, pNOV2117 contains the T-DNA portion flanked by the right and left border sequences, and including the Positech™ (Syngenta) plant selectable marker and the “candidate gene” gene expression cassette. The Positech™ plant selectable marker confers resistance to mannose and in this instance consists of the maize ubiquitin promoter driving expression of the PMI (phosphomannose isomerase) gene, followed by the cauliflower mosaic virus transcriptional terminator.

### Example 5

### Plant Transformation

[0509] 5.1 Rice Transformation

[0510] pNOVCANDiso is transformed into a rice cultivar (Kaybonnet) using Agrobacterium-mediated transformation, and mannose-resistant calli are selected and regenerated.

[0511] Agrobacterium is grown on YPC solid plates for 2-3 days prior to experiment initiation. Agrobacterial colonies are suspended in liquid MS media to an OD of 0.2 at λ600 nm. Acetosyringone is added to the agrobacterial suspension to a concentration of 200 μM and agro is induced for 30 min.

[0512] Three-week-old calli which are induced from the scutellum of mature seeds in the N6 medium (Chu et al., Sci. Sin., 18:659, 1975) are incubated in the agrobacterium solution in a 100×25 petri plate for 30 minutes with occasional shaking. The solution is then removed with a pipet and the callus transfered to a MSAs medium which is overlayed with sterile filter paper.

[0513] Co-Cultivation is continued for 2 days in the dark at 22° C.

[0514] Calli are then placed on MS-Timetin plates for 1 week. After that they are tranfered to PAA+mannose selection media for 3 weeks.

[0515] Growing calli (putative events) are picked and transfered to PAA+mannose media and cultivated for 2 weeks in light.

[0516] Colonies are tranfered to MS20SorbKinTim regeneration media in plates for 2 weeks in light. Small plantlets are transferred to MS20SorbKinTim regeneration media in GA7 containers. When they reach the lid, they are transfered to soil in the greenhouse.

[0517] Expression of the “candidate gene” in transgenic To plants is analyzed. Additional rice cultivars, such as but not limited to, Nipponbare, Taipei 309 and Fuzisaka 2 are also transformed and assayed for expression of the “candidate gene” product and enhanced protein expression.

[0518] 5.2: Maize Transformation

[0519] Transformation of immature mazie embryos is performed essentially as described in Negrotto et al. (Plant Cell Rpts., 19:798, 2000). For this example, all media constituents are as described in Negrotto et al., supra. However, various media constituents described in the literature may be substituted.

[0520] The genes used for transformation are cloned into a vector suitable for maize transformation as described in Example 17. Vectors used contain the phosphomannose isomerase (PMI) gene (Negrotto et al., 2000).

[0521] Agrobacterium strain LBA4404 (pSB1) containing the plant transformation plasmid is grown on YEP (yeast extract (5 g/L), peptone (10 g/L), NaCl (5 g/L),15 g/l agar, pH 6.8) solid medium for 2 to 4 days at 28° C. Approximately 0.8×10⁹ Agrobacteria are suspended in LS-inf media supplemented with 100 μM acetosyringone (As) (Negrotto et al., 2000). Bacteria are pre-induced in this medium for 30-60 minutes.

[0522] Immature embryos from A188 or other suitable maize genotypes are excised from 8-12 day old ears into liquid LS-inf +100 μM As. Embryos are rinsed once with fresh infection medium. Agrobacterium solution is then added and embryos are vortexed for 30 seconds and allowed to settle with the bacteria for 5 minutes. The embryos are then transferred scutellum side up to LSAs medium and cultured in the dark for two to three days. Subsequently, between 20 and 25 embryos per petri plate are transferred to LSDc medium supplemented with cefotaxime (250 mg/l) and silver nitrate (1.6 mg/l) and cultured in the dark for 28° C. for 10 days.

[0523] Immature embryos producing embryogenic callus are transferred to LSD1M0.5S medium. The cultures are selected on this medium for 6 weeks with a subculture step at 3 weeks. Surviving calli are transferred either to LSD1M0.5S medium to be bulked-up or to Reg1 medium. Following culturing in the light (16 hour light/8 hour dark regiment), green tissues are then transferred to Reg2 medium without growth regulators and incubated for 1-2 weeks. Plantlets are transferred to Magenta GA-7 boxes (Magenta Corp, Chicago Ill.) containing Reg3 medium and grown in the light. Plants that are PCR positive for the promoter-reporter cassette are transferred to soil and grown in the greenhouse.

### Example 6

### GeneChip® Standard Protocol

[0524] A rice gene array and probes derived from rice RNA extracted from different tissues and developmental stages can be used to identify the expression profile of genes on the chip.

[0525] The standard protocol for using the GeneChip® to quantitatively measure plant gene expression is carried out as outlined below:

[0526] Quantitation of Total RNA

[0527] 1. Total RNA from plant tissue is extracted and quantified using GeneQuant (Amersham Biosciences, Piscataway, N.J.) IOD₂₆₀=40 mg RNA/ml; A₂₆₀/A₂₈₀=1.9 to about 2.1

[0528] 2. Run gel to check the integrity and purity of the extracted RNA

[0529] Synthesis of Double-Stranded cDNA

[0530] Gibco/BRL SuperScript Choice System for cDNA Synthesis (Cat#1B090-019) is employed to prepare cDNAs. T7-(dT)₂₄ oligonucleotides are prepared and purified by HPLC. (5′-GGCCAGTGAATTGTAATACGACTCACTATAGGGAGGCGG-(dT)₂₄-3′; SEQ ID NO: 662).

[0531] Step 1. Primer Hybridization:

[0532] Incubate at 70° C. for 10 minutes

[0533] Spin quickly and put on ice briefly

[0534] Step 2. Temperature Adjustment:

[0535] Incubate at 42° C. for 2 minutes

[0536] Step 3. First Strand Synthesis Carried out Using:

[0537] DEPC-water-1:1

[0538] RNA (10:g final)-10:1

[0539] T7=(dT)₂₄ Primer (100 pmol final)-1:1 pmol

[0540] 5×1^{st} strand cDNA buffer-4:1

[0541] 0.1M DTT (10 mM final)-2:1

[0542] 10 mM dNTP mix (500:M final)-1:1

[0543] Superscript II RT 200 U/:1-1:1

[0544] Total of 20:1

[0545] Mix well

[0546] Incubate at 42° C. for 1 hour

[0547] Step 4. Second Strand Synthesis:

[0548] Place reactions on ice, quick spin

[0549] DEPC-water-91:1

[0550] 5×2^{nd} strand cDNA buffer-30:1

[0551] 10 mM dNTP mix (250 mM final)-3:1

[0552] E. coli DNA ligase (10 U/:1)-1:1

[0553] E. coli DNA polymerase 1-10 U/:1-4:1

[0554] RnaseH 2U/:1-1:1

[0555] T4 DNA polymerase 5 U/:1-2:1

[0556] 0.5 M EDTA (0.5 M final)-10:1

[0557] Total 162:1

[0558] Mix/spin down/incubate 16° C. for 2 hours

[0559] Step 5. Completing the Reaction:

[0560] Incubate at 16° C. for 5 minutes

[0561] Purification of Double Stranded cDNA

[0562] 1. Centrifuge PLG (Phase Lock Gel, Eppendorf 5 Prime Inc., pI-188233) at 14,000×, transfered 162:1 of cDNA to PLG

[0563] 2. Add 162:1 of Phenol:Chloroform:Isoamyl alcohol (pH 8.0), centrifuge 2 minutes

[0564] 3. Transfer the supernatant to a fresh 1.5 ml tube, add

[0565] Glycogen (5 mg/ml) 2

[0566] 0.5 M NH₄OAC (0.75×Vol) 120

[0567] ETOH (2.5×Vol, −20° C.) 400

[0568] 4. Mix well and centrifuge at 14,000×, for 20 minutes

[0569] 5. Remove supernatant, added 0.5 ml 80% EtOH (−20° C.)

[0570] 6. Centrifuge for 5 minutes, air dry or by speed vac for 5-10 minutes

[0571] 7. Added 44:1 DEPC H₂O

[0572] Analyze quantity and size distribution of cDNA

[0573] Run a gel using 1:1 ratio of the double-stranded synthesis product to loading buffer

[0574] Synthesis of Biotinylated cRNA

[0575] (Enzo BioArray High Yield RNA Transcript Labeling Kit Cat#900182)

| | |
|---|---|
| Purified cDNA | 22:1 |
| 10X Hy buffer | 4:1 |
| 10X biotin ribonucleotides | 4:1 |
| 10X DTT | 4:1 |
| 10X Rnase inhibitor mix | 4:1 |
| 20X T7 RNA polymerase | 2:1 |
| Total | 40:1 |

[0576] Centrifuge 5 seconds, and incubate for 4 hours at 37° C.

[0577] Gently mix every 30-45 minutes

[0578] Purification and Quantification of CRNA

[0579] (Qiagen Rneasy Mini kit Cat# 74103)

| | | |
|---|---|---|
| cRNA | 40:1 | |
| DEPC H₂O | 60:1 | |
| RLT buffer | 350:1 | mix by vortexing |
| EtOH | 250:1 | mix by pipetting |
| Total | 700:1 | |

[0580] Wait 1 minute or more for the RNA to stick

[0581] Centrifuge at 2000 rpm for 5 minutes

[0582] RPE buffer 500:1

[0583] Centrifuge at 10,000 rpm for 1 minute

[0584] RPE buffer 500:1

[0585] Centrifuge at 10,000 rpm for 1 minute

[0586] Centrifuge at 10,000 rpm for 1 minute to dry the column

[0587] DEPC H₂O 30:1

[0588] Wait for 1 minute, then elute CRNA from by centrifugation, 1 OK 1 minute

[0589] DEPC H₂O 30:1

[0590] Repeat previous step

[0591] Determine concentration and dilute to 1:g/:l concentration

[0592] Fragmentation of CRNA

| | |
|---|---|
| cRNA (1:g/:1) | 15:1 |
| 5X Fragmentation Buffer* | 6:1 |
| DEPC H₂O | 9:1 |
| | 30:1 |

*5x Fragmentation Buffer

| | | |
|---|---|---|
| 1M Tris (pH 8.1) | 4.0 | ml |
| MgOAc | 0.64 | g |
| KOAC | 0.98 | g |
| DEPC H₂O | | |
| Total | 20 | ml |
| Filter Sterilize | | |

[0593] Array Washed and Stained In:

[0594] Stringent Wash Buffer** **Stringent Buffer: 12×MES 83.3 ml, 5 M NaCl 5.2 ml, 10% Tween 1.0 ml, H₂O 910 ml, Filter Sterilize

[0595] Non-Stringent Wash Buffer*** ***Non-Stringent Buffer: 20×SSPE 300 ml, 10% Tween 1.0 ml, H₂O 698 ml, Filter Sterilize, Antifoam 1.0.

[0596] SAPE Stain**** ****SAPE stain: 2×Stain Buffer 600:1, BSA 48:1, SAPE 12:1, H₂O 540

[0597] Antibody Stain***** *****Antibody Stain: 2×Stain Buffer 300:1, H₂O 266.4:1, BSA 24:1, Goat IgG 6:1, Biotinylated Ab 3.6:1

[0598] Washed on Fluidics Station Using the Appropriate Antibody Amplification Protocol

### Example 6.2

### Characterization of Gene Expression Profiles

[0599] A rice gene array and probes derived from rice RNA extracted from different tissues and developmental stages are used to identify the expression profile of genes on the chip. The rice array contains over 23,000 genes (approximately 18,000 unique genes) or roughly 50% of the rice genome and is similar to the Arabidopsis GeneChip® (Affymetrix) with the exception that the 16 oligonucleotide probe sets do not contain mismatch probe sets. The level of expression is therefore determined by internal software that analyzes the intensity level of the 16 probe sets for each gene. The highest and lowest probes are removed if they do not fit into a set of predefined statistical criteria and the remaining sets are averaged to give an expression value. The final expression values are normalized by software, as described below. The advantages of a gene chip in such an analysis include a global gene expression analysis, quantitative results, a highly reproducible system, and a higher sensitivity than Northern blot analyses.

### Example 6.3

### Plant Growth Conditions and Sampling

[0600] Nipponbare rice is grown in the greenhouse with 12 hr light cycle and temperature of 29° C. during the day and 21° C. during the night. Humidity is maintained at 30%. Plants are grown in pots containing 50% sunshine mix and 50% nitrohumus. Individual tissues are collected from a minimum of five plants and pooled. Total RNA is extracted from one gram of tissue using the Qiagen RNA Easy Maxikit (Qiagen, Valencia, Calif.).

[0601] The experiments are carried out as described in Zhu et al., Plant Physiol. Biochem., 39:221, 2001.

### Example 6.4

### Data Analysis

[0602] Data analysis is done using GeneSpring (Silicon Genetics, Redwood, Calif.) and AlignAce. The genechip sequence is blasted to the AC rice contig sequences. The contig with the best alignment is extracted and five gene prediction programs are run on each contig. The programs used are Genscan trained on arabidopsis and maize, Gmhmm trained on rice and Arabidopsis, and Fgenesh and Glimmer trained on rice. All of the predicted CDSs are blasted against the genechip sequence again to extract the top hit predicted CDS. A Perl script is utilized to extract up to 2 kb of the putative promoter sequence. In some of the genechip sequences there is more than one perfect alignment to a predicted CDS; in such cases, both of the perfect alignments are accepted as the putative genes.

### Example 7

### Chromosomal Markers to Identify the Location of a Nucleic Acid Sequence

[0603] The sequences of the present invention can also be used for SSR mapping. SSR mapping in rice has been described by Miyao et al. (DNA Res 3:233 (1996)) and Yang et al. (Mol Gen Genet 245:187 (1994)), and in maize by Ahn et al. (Mol Gen Genet 241:483 (1993)). SSR mapping can be achieved using various methods. In one instance, polymorphisms are identified when sequence specific probes flanking an SSR contained within a sequence are made and used in polymerase chain reaction (PCR) assays with template DNA from two or more individuals or, in plants, near isogenic lines. A change in the number of tandem repeats between the SSR-flanking sequence produces differently sized fragments (U.S. Pat. No. 5,766,847). Alternatively, polymorphisms can be identified by using the PCR fragment produced from the SSR-flanking sequence specific primer reaction as a probe against Southern blots representing different individuals (Refseth et al., Electrophoresis 18:1519 (1997)). Rice SSRs can be used to map a molecular marker closely linked to functional gene, as described by Akagi et al. (Genome 39:205 (1996)).

[0604] The sequences of the present invention can be used to identify and develop a variety of microsatellite markers, including the SSRs described above, as genetic markers for comparative analysis and mapping of genomes.

[0605] Many of the polynucleotides described herein contain at least 3 consecutive di-, tri- or tetranucleotide repeat units in their coding region that can potentially be developed into SSR markers. Table 2. Trinucleotide motifs that can be commonly found in the coding regions of said polynucleotides and easily identified by screening the polynucleotides sequences for said motifs are, for example: CGG; GCC, CGC, GGC, etc. Once such a repeat unit has been found, primers can be designed which are complementary to the region flanking the repeat unit and used in any of the methods described below.

[0606] Sequences of the present invention can also be used in a variation of the SSR technique known as inter-SSR (ISSR), which uses microsatellite oligonucleotides as primers to amplify genomic segments different from the repeat region itself (Zietkiewicz et al., Genomics 20:176, 1994). ISSR employs oligonucleotides based on a simple sequence repeat anchored or not at their 5′- or 3′-end by two to four arbitrarily chosen nucleotides, which triggers site-specific annealing and initiates PCR amplification of genomic segments which are flanked by inversely orientated and closely spaced repeat sequences. In one embodiment of the present invention, microsatellite markers as disclosed herein, or substantially similar sequences or allelic variants thereof, may be used to detect the appearance or disappearance of markers indicating genomic instability as described by Leroy et al. (Electron. J Biotechnol, 3(2), at http://www.ejb.org (2000)), where alteration of a fingerprinting pattern indicated loss of a marker corresponding to a part of a gene involved in the regulation of cell proliferation. Microsatellite markers are useful for detecting genomic alterations such as the change observed by Leroy et al. (Electron. J Biotechnol, 3(2), supra (2000)) which appeared to be the consequence of microsatellite instability at the primer binding site or modification of the region between the microsatellites, and illustrated somaclonal variation leading to genomic instability. Consequently, sequences of the present invention are useful for detecting genomic alterations involved in somaclonal variation, which is an important source of new phenotypes.

[0607] In addition, because the genomes of closely related species are largely syntenic (that is, they display the same ordering of genes within the genome), these maps can be used to isolate novel alleles from wild relatives of crop species by positional cloning strategies. This shared synteny is very powerful for using genetic maps from one species to map genes in another. For example, a gene mapped in rice provides information for the gene location in maize and wheat.

### Example 8

### Ouantitative Trait Linked Breeding

[0608] Various types of maps can be used with the sequences of the invention to identify Quantitative Trait Loci (QTLs) for a variety of uses, including marker-assisted breeding. Many important crop traits are quantitative traits and result from the combined interactions of several genes. These genes reside at different loci in the genome, often on different chromosomes, and generally exhibit multiple alleles at each locus. Developing markers, tools, and methods to identify and isolate the QTLs involved in a trait, enables marker-assisted breeding to enhance desirable traits or suppress undesirable traits. The sequences disclosed herein can be used as markers for QTLs to assist marker-assisted breeding. The sequences of the invention can be used to identify QTLs and isolate alleles as described by Li et al. in a study of QTLs involved in resistance to a pathogen of rice. (Li et al., Mol Gen Genet 261:58, 1999). In addition to isolating QTL alleles in rice, other cereals, and other monocot and dicot crop species, the sequences of the invention can also be used to isolate alleles from the corresponding QTL(s) of wild relatives. Transgenic plants having various combinations of QTL alleles can then be created and the effects of the combinations measured. Once an ideal allele combination has been identified, crop improvement can be accomplished either through biotechnological means or by directed conventional breeding programs. (Flowers et al., J. Exp. Bot. 51:99, 2000; Tanksley and McCouch, Science 277:1063, 1997).

### Example 9

### Marker-Assisted Breeding

[0609] Markers or genes associated with specific desirable or undesirable traits are known and used in marker assisted breeding programs. It is particularly beneficial to be able to screen large numbers of markers and large numbers of candidate parental plants or progeny plants.

[0610] Marker-assisted selection uses information about marker associated QTLs in selection programs to select individuals with desirable combinations of QTLs. Markers of the present invention can also be used to introduce desired genes and/or QTLs into a population. For example, markers identified by the method of the present invention can be used to assist in the introduction of a QTL or gene into a population by introgression (Dekkers and Hospital, Nat. Rev. Genet. 3:22, 2002)

[0611] Marker assisted selection is a well-established technique in genetics and involves the process where organisms are selected based on the presence or absence of a nucleic acid sequence associated with a particular trait or phenotype. In addition, the markers identified by the methods disclosed herein can be used to produce hybridization probes that can be used in selection. Markers produced by the methods of the present invention can be used to identify and follow quantitative trait loci or QTLs. Marker assisted selection has the advantage of allowing organisms to be selected for the phenotype, trait or QTL prior to when it would be phenotypically apparent. Because it allows for early selection, marker-assisted selection decreases the amount of time need for selection and thus allows more rapid genetic progress.

[0612] Sequences disclosed herein that can be used for markers of OTLs are given in Tables 3, 4, 5 and 6. The sequences were further characterized by their change in expression in response to various conditions related to the traits listed. For example, if the trait of interest was abiotic stress, sequences associated with a QTL and that showed either at least a 2-fold or 4-fold change in expression in response to an abiotic stress were identified. A similar procedure was used for the additional traits listed in Tables 3, 4, 5, and 6. Thus Table 3A lists sequences associated with the listed rice QTLs and that show at least a 4-fold change in expression in relation to the listed trait. Table 4A lists sequences associated with the listed rice QTLs and that show at least a 2-fold change in expression in relation to the listed trait. Table 5A lists sequences associated with the listed maize QTLs and that show at least a 4-fold change in expression in relation to the listed trait. Table 6A lists sequences associated with the listed maize QTLs and that show at least a 2-fold change in expression in relation to the listed trait.

[0613] The sequences listed in Tables 3, 4, 5, and 6 can be used are markers for the associated QTLs in marker assisted breeding. In addition, the expression of the sequences listed in Tables 3, 4, 5, and 6 can be altered (e.g. either increased or decreased) in order to improved performance of plants, and in particular cereals, for the traits listed using standard techniques, including, but not limited to, those described herein.

TABLE 1
SEQ ID NOs and corresponding descriptions of rice sequences associated with
isoprenoid metabolism; SEQ ID NOs for corresponding homologous sequences
found in wheat, banana and maize; and the AGI number for
corresponding Arabidopsis sequences.

| | | | | | |
|---|---|---|---|---|---|
| Rice | Wheat | Banana | Maize | | |
| SEQ ID | SEQ ID | SEQ ID | SEQ ID | | AGI |
| NO | NO | NO | NO | Gene Product | number |

mevalonate-independent pathway (plus IPPI)

| | | | | | |
|---|---|---|---|---|---|
| | | | | 1-deoxy-D-xylulose 5-phosphate | |
| | | | | synthase (3 sequences) | |
| 113 | 500 | 430 | 635 | DXPS1 | At3g21500 |
| 113 | 500 | 430 | 635 | DXPS2 (CLA1) | At4g15560 |
| 99 | 508 | | | DXPS3 | At5g11380 |
| 267 | 555 | 418 | | 1-deoxy-D-xylulose 5-phosphate | At5g62790 |
| | | | | reductoisomerase (EC 1.1.1.-; | |
| | | | | DXR) | |
| 153 | | | | 2-C-methyl-D-erythritol 4- | At2g02500 |
| | | | | phosphate cytidyltransferase | |
| | | | | (MCT) | |
| | | | | 4-(cytidine 5″-diphospho)-2-C- | At2g26930 |
| | | | | methyl-D-erythritol kinase (CMK) | |
| 161 | 570 | 463 | 612 | 2-C-methyl-D-erythritol 2,4- | At1g63970 |
| | | | | cyclodiphosphate synthase | |
| | | | | (MECPS) | |
| | | | | lytB homologue | At4g34350 |
| | | | | gcpE homologue | At5g60600 |
| | | | | isopentenyl diphosphate: | |
| | | | | dimethylallyl diphosphate | |
| | | | | isomerase (EC 5.3.3.2) | |
| | | | | IPPI1 | At3g02780 |
| | | | | IPPI2 | At5g16440 |

prenyltransferases

| | | | | | |
|---|---|---|---|---|---|
| | | | | geranyl diphosphate synthase (EC) | At2g34630 |
| | | | | farnesyl diphosphate synthase | |
| | | | | (EC) | |
| 265 | 474 | 448 | 607 | FPPS1 | At4g17190 |
| 265 | 474 | 448 | 607 | FPPS2 | At5g47770 |
| | | | | geranylgeranyl diphosphate | |
| | | | | synthase (EC) | |
| | | | | GGPPS1 | At1g49530 |
| 371 | | | 587 | GGPPS2 | At2g18620 |
| 229 | | | | GGPPS3 | At2g18640 |
| | | | | GGPPS4 | At2g23800 |
| | | | | GGPPS5 | At3g14510 |
| | | | | GGPPS6 | At3g14530 |
| | | | | GGPPS7 | At3g14550 |
| | | | | GGPPS8 | At3g20160 |
| 47 | | | | GGPPS9 | At3g29430 |
| | | | | GGPPS10 | At3g32040 |
| | | | | GGPPS11 | At4g36810 |
| 83 | 574 | 468 | 604 | GGPPS12 | At4g38460 |
| 135 | 531 | 454 | 622 | geranylgeranyl reductase | At1g74470 |
| | | | | solanesyl diphosphate synthase- | |
| | | | | like | |
| | | | | SDS-like 1 (prephytoene PP | At1g17050 |
| | | | | dehydrogenase) | |
| | | | | SDS-like2 (prenyltransferase) | At1g78510 |
| | | | | undecaprenyldiphosphate | |
| | | | | synthase-like (3 sequences) | |
| 235 | | | | UPPS-like1 (hypothetical) | At2g17570 |
| 345 | | | | UPPS-like2 | At5g60500 |
| 243 | | | | UPPS-like3 | At5g60510 |
| 299 | | | | | |
| | | | | dehydrodolichol diphosphate | |
| | | | | synthase (3 sequences) | |
| 125 | | | | DPPS-like1 (hypothetical) | At2g23410 |
| 11 | | | | DPPS2 | At5g58770 |
| | | | | DPPS3 | At5g58780 |

protein prenyltransferases

| | | | | | |
|---|---|---|---|---|---|
| 189 | 488 | | 599 | farnesyltransferase/geranylgeranyl | At3g59380 |
| | | | | transferase I, a-subunit | |
| | | | | farnesyltransferase, b-subunit | At5g40280 |
| | | | | (ERA1) | |
| 255 | 489 | | 624 | geranylgeranyl transferase I, b- | At2g39550 |
| 63 | | | | subunit | |
| 373 | | | | | |
| | | | | (Rab) geranylgeranyl transferase | |
| | | | | II, a-subunit | |
| 23 | 580 | 419 | 591 | GGTase II a-1 | At4g24490 |
| 289 | | | | GGTase II a-2 | At5g41820 |
| | | | | (Rab) geranylgeranyl transferase | |
| | | | | II, b-subunit | |
| 343 | 478 | | | GGTase II b-1 | At3g12070 |
| 343 | 478 | | | GGTase II b-2 | At5g12210 |

terpene synthases (cyclases)

| | | | | | |
|---|---|---|---|---|---|
| 357 | | | | monoterpene synthases, | At1g31950 |
| | | | | sesquiterpene synthases and | |
| | | | | diterpene synthases | |
| 157 | | | | (not copalyl diphosphate synthase | At1g33750 |
| 137 | | | | and ent-kaurene synthase) (all by | |
| 43 | 505 | 464 | 623 | homology) | |
| 39 | 504 | | 661 | | |
| 233 | | | | | |
| | | | | monoterpene synthases & | |
| | | | | sesguiterpene synthases | |
| | | | | TPS3 | At1g48800 |
| 145 | | | | TPS4 | At1g48820 |
| 185 | | | | | |
| 385 | | | | | |
| 387, | | | | TPS5 | At1g61120 |
| 327 | 516 | | | | |
| 77 | 559 | | | TPS6 | At1g61680 |
| | | | | TPS7 | At1g66020 |
| 281 | | | | TPS8 | At1g70080 |
| | | | | TPS9 | At2g23230 |
| 101 | | | | TPS10 | At2g24210 |
| 55 | 507 | | 592 | TPS11 (short) | At2g37140 |
| 249 | 513 | | | TPS12 | At3g14490 |
| 81 | | | | TPS13 | At3g14520 |
| 57 | 526 | | | TPS14 | At3g14540 |
| 99 | 508 | | | TPS15 | At3g25810 |
| 167 | | | | | |
| 369 | 553 | 423 | 659 | | |
| 1 | | | | | |
| 305 | 560 | | | | |
| 247 | 527 | 420 | 627 | | |
| 71 | 487 | | | TPS15 | At3g25810 |
| 159 | | 438 | | | |
| 171 | | | | | |
| | | | | TPS16 | At3g25823 |
| 171 | | 438 | | TPS17 | At3g25830 |
| 351 | | | 598 | TPS18 | At3g29110 |
| 319 | 577 | 459 | | TPS19 | At3g29190 |
| 227 | | | | TPS20 | At3g29410 |
| | | | | TPS21 (short) | At3g31415 |
| 109 | 569 | 444 | 637 | TPS22 | At3g32030 |
| 151 | | | | TPS23 | At4g13280 |
| 375 | | | | | |
| 151 | 514 | | 585 | TPS24 | At4g13300 |
| 181 | | | | | |
| 151 | 514 | | 585 | TPS25 | At4g15870 |
| | | | | TPS26 | At4g16730 |
| | | | | TPS27 | At4g16740 |
| 201 | | | | TPS28 | At4g20200 |
| 347 | 509 | | 609 | | |
| 209 | | | | | |
| 211 | | | | | |
| 231 | 483 | 450 | | | |
| 241 | 573 | 456 | 657 | | |
| 69 | 573 | 456 | 657 | | |
| 319 | 577 | 459 | | TPS29 | At4g20210 |
| 263 | 568 | 416 | | TPS30 | At4g20230 |
| 321 | 494 | | 626 | TPS31 | At5g23960 |
| 257 | 554 | 435 | 601 | TPS32 | At5g44630 |
| 179 | 543 | | 611 | | |
| 279 | 515 | | 654 | TPS33 | At5g48110 |
| | | | | triterpene synthases (not | |
| | | | | membranesterol biosynthesis) | |
| | | | | lupeol synthase-like | |
| | | | | LS1 | At1g66960 |
| 115 | 548 | 458 | 640 | LS2 | At1g78950 |
| | | | | LS3(multifunctional) | At1g78960 |
| 115 | 548 | 458 | 640 | LS4(LUP1) | At1g78970 |
| | | | | 2,3-oxidosqualene synthase-like (6 | |
| | | | | sequences) | |
| | | | | TTPS1 | At1g78500 |
| | | | | TTPS2 | At4g15340 |
| 217 | | | | TTPS3 | At4g15370 |
| 283 | 490 | | | | |
| 51 | | | | | |
| 273 | 537 | 447 | 588 | TTPS4 | At5g36150 |
| 9 | | | | | |
| 19 | 584 | 460 | | | |
| 129 | | | | | |
| 41 | 540 | | 652 | | |
| | | | | TTPS5 | At5g42600 |
| | | | | TTPS6 | At5g48010 |

gibberellins

| | | | | | |
|---|---|---|---|---|---|
| | | | | copalyl diphosphate synthase | At4g02780 |
| | | | | (GA1) | |
| 107 | 491 | | 593 | ent-kaurene synthase (GA2) | At1g79460 |
| | | | | ent-kaurene oxidase (GA3) | At5g25900 |
| | | | | ent-kaurenoic acid oxidase | |
| 67 | | | | KAO1 | At1g05160 |
| 155 | 572 | | 621 | | |
| | | | | KAO2 | At2g32440 |
| 399 | 501 | 445 | 647 | gibberellin 7 oxidase | At5g05600 |
| | | | | gibberellin 13-hydroxylase | |
| | | | | gibberellin 20-oxidase | |
| 79 | | | | GA5-1 | At1g44090 |
| 25 | | | | GA5-2 | At1g60980 |
| 75 | | | | GA5-3 | At4g25420 |
| 79 | | | | GA5-4 | At5g07200 |
| | | | | GA5-5 | At5g51810 |
| | | | | gibberellin 3-hydroxylase | |
| 297 | 581 | | 646 | GA4-1 | At1g15550 |
| 359 | 533 | | | GA4-2 | At1g80330 |
| 225 | 575 | | 653 | | |
| 291 | 541 | 436 | 596 | GA4-3 | At1g80340 |
| 253 | 544 | | 630 | | |
| 377 | 552 | 466 | 650 | | |
| 75 | 539 | | 636 | GA4-4 | At4g25420 |
| | | | | gibberellin 2-oxidase | |
| 141 | 511 | 453 | 614 | 2OX-1 | At1g30040 |
| 141 | 511 | 453 | 614 | 2OX-2 | At1g78440 |
| 173 | 545 | | 629 | 2OX-3 | At2g34550 |
| 193 | 472 | | | | |
| 203 | 520 | | | | |
| 205 | | | | | |
| 259 | 499 | | 656 | | |
| 261 | 486 | | 638 | | |
| 349 | 542 | 467 | 590 | | |
| 375 | 512 | 465 | | | |
| 97 | | | | | |
| 223 | | | | | |

carotenoids and abscisic acid

| | | | | | |
|---|---|---|---|---|---|
| 317 | 582 | 469 | 628 | phytoene synthase | At5g17230 |
| | | | | phytoene desaturase (PDS) | At4g14210 |
| 383 | 506 | | | zeta-carotene desaturase (ZDS) | At3g04870 |
| 205 | 532 | 427 | 597 | lyeopene b-cyclase (LCYB) | At3g10230 |
| 237 | | | | | |
| 121 | | | | | |
| 27 | | | | | |
| | | | | lycopene e-cyelase (LCYE) | At5g57030 |
| | | | | beta carotene hydroxylase | |
| | | | | zeaxanthin epoxidase (ZEP) | At5g67030 |
| | | | | violaxanthin de-epoxidase (VDE1) | At1g08550 |
| | | | | epoxycarotenoid (neoxanthin) | |
| | | | | cleavage enzyme | |
| 301 | 517 | | 645 | NC1 | At1g30100 |
| | | | | NC2 | At1g78390 |
| | | | | NC3 | At3g14440 |
| 103 | | | | NC4 | At3g24220 |
| 245 | 561 | 442 | 613 | NC5 | At3g63520 |
| | | | | NC6 | At4g18350 |
| 271 | 524 | | 645 | NC7 | At4g19170 |
| 313 | 473 | | | abscisic aldehyde oxidase | At2g27150 |
| 391 | | 473 | | carotenoid isomerase 2 | At1g57770 |
| | | | | (CRTISO2) | |
| 397 | 567 | 446 | 615 | beta-carotene hydroxylase (CHY1) | At4g25700 |
| 395 | 481 | 431 | | plastid terminal oxidase (PTO) | At4g22260 |
| | | | | (immutans) | |

Tocopherols

| | | | | | |
|---|---|---|---|---|---|
| 275 | | | 658 | p-hydroxyphenylpyruvate | At1g06570 |
| | | | | dioxygenase (HPPD) (1 sequence) | |
| 89 | 535 | 439 | | C-methyltransferase | |
| | | | | tocopherol cyclase | |
| | | | | gama tocopherol C- | At1g64970 |
| | | | | methyltransferase (TMT) | |

Plastoquinone and phylloquinone

| | | | | | |
|---|---|---|---|---|---|
| 213 | 576 | | | homogentisate (hexaprenyl) | At3g11950 |
| | | | | solanesyltransferase (1 sequence) | |
| | | | | C-methyltransferase | |
| | | | | isochorismate synthase (EC | |
| | | | | 5.4.99.6; entC) | |
| | | | | | At1g18870 |
| 29 | | | | | At1g74710 |
| 17 | | | | | |
| | | | | SHCHC synthase (menD) | At1g68890 |
| | | | | (menaquinone biosynthesis) | |
| | | | | OSB synthase (menC) | At1g68900 |
| | | | | (hypothetical) | |
| 87 | 557 | 432 | 618 | OSB-CoA ligase (menE) | At3g48990 |
| | | | | (p-coumaroyl-CoA ligase) | |
| | | | | DHNA synthase | At1g60550 |
| 85 | 485 | | | DHNA phytyltransferase (menA) | At1g60600 |
| | | | | (hypothetical) | |
| | | | | C-methyltransferase (ubiE) | At1g23360 |
| | | | | (spore germination protein c2) | |
| 393 | 536 | 425 | | C-methyltransferase (ubiE) | At3g02770 |
| 207 | 536 | 425 | | | |
| 401 | 536 | 425 | 616 | C-methyltransferase (ubiE) | At5g16450 |
| 285 | 536 | 425 | 616 | | |
| 89 | 535 | 439 | | C-methyltransferase (ubiE) | At5g56260 |
| 213 | 576 | | | homogentisate | At3g11950 |
| | | | | polyprenyltransferase | |

Chlorophyll and heme

| | | | | | |
|---|---|---|---|---|---|
| | | | | glutamyl tRNA synthetase | At5g26707 |
| | | | | glutamyl tRNA reductase | |
| 149 | 547 | 417 | 644 | HEMA1 | At1g09940 |
| 149 | 547 | 417 | 644 | HEMA2 | At1g58290 |
| 149 | 547 | 417 | 644 | HEMA3 | At2g31250 |
| | | | | glutamate 1-semialdehyde | |
| | | | | aminotransferase | |
| | | | | GSA1 | At3g48730 |
| | | | | GSA2 | At5g63570 |
| | | | | aminolevulinate dehydratase | |
| | | | | ALAD1 | At1g44318 |
| | | | | ALAD2 | At1g69740 |
| | | | | porphobilinogen deaminase | At5g08280 |
| | | | | (HEM3) | |
| | | | | uroporphyrinogen decarboxylase | |
| 335 | 522 | 455 | 639 | UPD1 | At2g40490 |
| 191 | | | 634 | UPD2 | At3g14930 |
| | | | | coproporphyrinogen III oxidase | At1g03475 |
| | | | | (CPOX) | |
| | | | | protoporphyrinogen IX oxidase | |
| | | | | PPO1 | At4g01690 |
| | | | | PPO2 | At5g14220 |
| | | | | Mg-protoporphyrinogen IX | |
| | | | | chelatase | |
| | | | | CLD1 | At1g08520 |
| 295 | | | | CLD2 | At4g18480 |
| 175 | 546 | 438 | | | |
| 325 | | | | | |
| 139 | 525 | | | | |
| 53 | | | | CLD3 | At5g49530 |
| 31 | 484 | 461 | | Mg-protoporphyrinogen IX | At4g25080 |
| | | | | methyltransferase (PPMT) | |
| | | | | Mg-protoporphyrinogen IX | |
| | | | | monomethylester cyclase | |
| | | | | divinyl-protochlorophyllide a | |
| | | | | reductase | |
| | | | | protochlorophyllide reductase (EC | |
| | | | | 1.3.1.33) | |
| 339 | | | | POR1 (PORC; light-dependent) | At1g03630 |
| | | | | POR2 (PORB) | At4g27440 |
| | | | | POR3 (PORA) | At5g54190 |
| 105 | 571 | 433 | | chlorophyll synthetase | At3g51820 |
| | | | | chlorophyll a oxygenase | At1g44446 |
| | | | | (chlorophyll b synthase) | |
| | | | | chlorophyllase | |
| | | | | CLH1 | At1g19670 |
| 177 | | | | CLH2 | At5g43860 |
| 117 | 578 | | | red chlorophyll catabolite | At4g37000 |
| 363 | | | | reductase | |
| 355 | | | | | |
| 143 | 528 | | | | |
| | | | | ferrochelatase | |
| | | | | FC1 | At2g30390 |
| | | | | FC2 | At5g26030 |
| | | | | heme oxygenase | |
| | | | | HO1 | At1g58300 |
| 277 | 495 | | | HO2 | At1g69720 |
| 127 | | | | | |
| 47 | | | | HO3 | At2g26550 |
| 221 | 518 | | | | |
| | | | | HO4 | At2g26670 |
| 199 | | 428 | | phytochromobilin synthase (HY2) | At3g09150 |
| 307 | 510 | 421 | 642 | | |

mevalonate pathway

| | | | | | |
|---|---|---|---|---|---|
| | | | | acetoacetyl-CoA thiolase | |
| 165 | 558 | 452 | | AACT1 | At5g47720 |
| 165 | 558 | 452 | | AACT2 | At5g48230 |
| 315 | 564 | 470 | 606 | 3-hydroxy-3-methylglutaryl-CoA | At4g11820 |
| | | | | synthase | |
| | | | | 3-hydroxy-3-methylglutaryl-CoA | |
| | | | | reductase | |
| 133 | 476 | 426 | 641 | HMGR1 | At1g76490 |
| 353 | | 457 | 641 | HMGR2 | At2g17370 |
| 111 | 479 | | | mevalonate kinase | At5g27450 |
| | | | | phosphomevalonate kinase | At1g31910 |
| | | | | mevalonate diphosphate | |
| | | | | decarboxylase | |
| 293 | 551 | 443 | | MPDC1 | At2g38700 |
| 365 | 551 | 443 | | | |
| | | | | MPDC2 | At3g54250 |

sterols and brassinosteroids

| | | | | | |
|---|---|---|---|---|---|
| | | | | squalene synthase | |
| 169 | 566 | | 649 | SQSl | At4g34640 |
| 169 | 566 | | 649 | SQS2 | At4g34650 |
| | | | | squalene monooxygenase (EC | |
| | | | | 1.14.99.7) | |
| | | | | SE1 | At1g58440 |
| | | | | SE1 | At2g22830 |
| | | | | SE1 | At4g37760 |
| 309 | | | | SE1 | At5g24140 |
| 173 | 545 | | 629 | | |
| 147 | 523 | 424 | | SE1 | At5g24150 |
| 303 | | | | SE1 | At5g24160 |
| | | | | cycloartenol synthase (EC | |
| | | | | 5.4.99.8) | |
| | | | | 1 | At2g07050 |
| 361 | | 458 | | 2 | At3g45130 |
| 13 | 556 | 449 | 610 | cycloartenol C24 | At5g13710 |
| | | | | methyltransferase | |
| | | | | 24-methylenecycloartenol C-4 | At4g12110 |
| | | | | demethylase | |
| 195 | 475 | | | (additional candidate) | At4g22750 |
| | | | | cycloeucalenol cycloisomerase | At5g50375 |
| 123 | | | | sterol C14 reductase (fackel) | At3g50430 |
| 311 | 521 | 415 | | | |
| 59 | 503 | | | | |
| | | | | obtusifoliol 14-demethylase | |
| | | | | (CYP51) | |
| | | | | CYP51-1 | At1g11680 |
| | | | | CYPS1-2 | At2g17330 |
| 33 | 477 | | | C-8,7 sterol isomerase | At1g20050 |
| | | | | sterol C-methyltransferase 2 | |
| 251 | 529 | 471 | 625 | SMT2-1 | At1g20330 |
| 251 | 529 | 471 | 625 | SMT2-2 | At1g76090 |
| | | | | sterol C-4 methyl oxidase | |
| | | | | (demethylase) | |
| 219 | 482 | | | S4MO-1 | At1g07420 |
| | | | | S4MO-2 | At2g29390 |
| | | | | sterol C5-desaturase (2 sequences) | |
| 287 | 530 | 422 | 608 | DWF7-1 | At3g02580 |
| 287 | 530 | 422 | 608 | DWF7-2 | At3g02590 |
| | | | | sterol delta 7 reductase | At1g50430 |
| 333 | 562 | 440 | 620 | sterol C24-reductase (DWF1, | At3g19820 |
| | | | | diminuto) | |
| 337 | | | | sterol reductase (DET2) | At2g38050 |
| | | | | sterol C 22-desaturase | not |
| | | | | sterol glucosyltransferase (EC | At1g43620 |
| | | | | 2.4.1.173) | |
| | | | | | At3g07020 |
| 323 | | | 631 | steroid C22-hydroxylase | At3g50660 |
| 49 | | | 660 | (CYP90B1; DWF1) | |
| | | | | steroid C23-hydroxylase | At5g05690 |
| | | | | (CYP90A1) | |
| 45 | 565 | 462 | 589 | 3-oxo-5-a-sterol reductase | At5g16010 |
| 119 | | | 632 | | |
| | | | | steroid sulfotransferase-like (SST) | |
| 379 | 493 | | | SST1 | At1g13420 |
| 37 | | | | SST2 | At1g13430 |
| 183 | | | | SST3 | At1g28170 |
| 269 | | | | | |
| 65 | 538 | | 602 | SST4 | At2g03750 |
| 389 | | | | SST5 | At2g03760 |
| 15 | 492 | | 643 | SST6 | At2g27570 |
| 367 | | | | SST7 | At2g43420 |
| 131 | 497 | | 633 | SST8 | At3g45070 |
| 197 | 497 | | | | |
| 5 | | | | SST9 | At4g26280 |
| 329 | 492 | | 605 | | |
| 61 | | | | SST10 | At5g07000 |
| 3 | 492 | | 643 | SST11 | At5g07010 |
| 91 | 549 | | 595 | SST12 | At5g43690 |
| 331 | 583 | | 619 | | |
| 95 | 496 | | | 3-beta-hydroxysteroid | At2g33630 |
| | | | | dehydrogenase-like | |
| | | | | 11-beta-hydroxysteroid | |
| | | | | dehydrogenase-like (STDH) | |
| 187 | | | | STDH1 | At4g10020 |
| 341 | 480 | | 651 | STDH2 | At5g50600 |
| 35 | | | | STDH3 | At5g50770 |
| 163 | | | | | |
| 21 | 550 | 441 | | 17-beta-hydroxysteroid | At1g76150 |
| | | | | dehydrogenase-like | |

ubiquinone biosynthesis

| | | | | | |
|---|---|---|---|---|---|
| | | | | p-hydroxybenzoate (hexaprenyl) | At4g23660 |
| | | | | solanesyltransferase (CoQ2) | |
| | | | | monooxygenase (ubiF/ubiH-like) | At3g24200 |
| | | | | (monooxygenase) | |
| | | | | O-methyltransferase | At2g30920 |
| | | | | (multifunctional) (CoQ3) | |
| | | | | decarboxylase | |
| 239 | 498 | 451 | | C-methyltransferase (CoQ5/ubiE) | At5g57300 |
| 7 | 579 | 434 | 594 | CoQ 4 homologue (function | At2g03690 |
| 381 | 579 | 434 | 594 | unknown) | |

[0614] TABLE 2

This table provides the start and end points for
simple sequence repeats (SSRs) contained in the
sequences listed.

| | | | |
|---|---|---|---|
| Seq ID | Start | End | Sequence |

| | | | |
|---|---|---|---|
| 15 | 362 | 376 | CCG |
| 31 | 216 | 230 | CCG |
| 39 | 230 | 247 | AGG |
| | 371 | 385 | AGG |
| 41 | 101 | 115 | CGG |
| 45 | 7 | 27 | ATC |
| 51 | 1093 | 1107 | TCA |
| 59 | 71 | 85 | GCC |
| 63 | 664 | 678 | AAG |
| 73 | 616 | 633 | GAT |
| 77 | 83 | 103 | CTT |
| 83 | 53 | 70 | CGC |
| 107 | 28 | 45 | AGC |
| 109 | 1609 | 1623 | AGC |
| 117 | 81 | 95 | TGG |
| 119 | 146 | 160 | CTG |
| | 182 | 196 | GTG |
| | 244 | 258 | GGT |
| | 258 | 275 | TGA |
| 125 | 11 | 28 | CGG |
| 133 | 1727 1742 | GAAA | |
| 155 | 477 | 494 | TCC |
| 157 | 60 | 74 | ACC |
| 191 | 148 | 162 | GAG |
| 211 | 996 | 1013 | GA |
| 215 | 55 | 72 | CTG |
| 225 | 75 | 89 | AGG |
| 229 | 130 | 144 | CCG |
| 245 | 2331 | 2348 | AAG |
| 247 | 641 | 655 | CCG |
| 257 | 77 | 91 | ACC |
| 261 | 349 | 363 | GAT |
| 271 | 49 | 63 | CCG |
| 275 | 56 | 79 | AG |
| | 94 | 109 | GTGC |
| | 164 | 190 | CGG |
| 291 | 153 | 173 | CGA |
| | 338 | 352 | CCG |
| 299 | 28 | 42 | CTT |
| 313 | 8 | 22 | CGC |
| 321 | 324 | 338 | GAG |
| 323 | 289 | 303 | GAG |
| | 342 | 359 | CGG |
| 349 | 132 | 146 | GTC |
| 363 | 157 | 177 | AAG |
| | 465 | 482 | CGA |
| 371 | 95 | 115 | CGG |
| 389 | 236 | 250 | CGT |
| | 382 | 397 | CGCT |
| | 486 | 501 | AGCC |
| 399 | 194 | 208 | CGG |
| | 1059 1073 | CGC | |

[0615] TABLE 3A
Sequences associated with the listed rice quantitative trait loci
(QTLs) and showing at least a 4-fold alteration in expression associated
with the listed trait.

| QTL | TRAIT | SEQ ID |
|---|---|---|
| ABIOTIC_STRESS_OS-LFDRY-10-1 | ABIOTIC STRESS | 259 |
| ABIOTIC_STRESS_OS-LFDRY-11-1 | ABIOTIC STRESS | 283 |
| ABIOTIC_STRESS_OS-LFDRY-4-2 | ABIOTIC STRESS | 87 |
| ABIOTIC_STRESS_OS-RGR-12-1 | ABIOTIC STRESS | 233 |
| ABIOTIC_STRESS_OS-RGR-12-1 | ABIOTIC STRESS | 233 |
| ABIOTIC_STRESS_OS-RGR-12-1 | ABIOTIC STRESS | 233 |
| ABIOTIC_STRESS_OS-RRL-11-1 | ABIOTIC STRESS | 283 |
| ABIOTIC_STRESS_OS-SSL-10-1 | ABIOTIC STRESS | 259 |
| ABIOTIC_STRESS_OS-ST-1-2 | ABIOTIC STRESS | 285 |
| MATURITY_OS-DTF10-8-2 | MATURITY | 273 |
| MATURITY_OS-HT-2-2 | MATURITY | 273 |
| MATURITY_OS-HT-8-1 | MATURITY | 273 |
| PATHOGEN_RESISTANCE_OS-BP-3-1 | PATHOGEN RESISTANCE | 319 |
| PATHOGEN_RESISTANCE_OS-LS-2-1 | PATHOGEN RESISTANCE | 25 |
| PATHOGEN_RESISTANCE_OS-LS-3-1 | PATHOGEN RESISTANCE | 33 |
| PATHOGEN_RESISTANCE_OS-LS-3-3 | PATHOGEN RESISTANCE | 319 |
| PATHOGEN_RESISTANCE_OS-SB-11-1 | PATHOGEN RESISTANCE | 27 |
| PATHOGEN_RESISTANCE_OS-SB-2-1 | PATHOGEN RESISTANCE | 99 |
| QUALITY_OS-BDV-12-1 | GRAIN_QUALITY | 131 |
| QUALITY_OS-BDV-12-1 | GRAIN_QUALITY | 131 |
| QUALITY_OS-BDV-12-1 | GRAIN_QUALITY | 131 |
| QUALITY_OS-BDV-12-1 | GRAIN_QUALITY | 131 |
| QUALITY_OS-PKV-12-1 | GRAIN_QUALITY | 131 |
| QUALITY_OS-PKV-12-1 | GRAIN_QUALITY | 131 |
| QUALITY_OS-PKV-2-1 | GRAIN_QUALITY | 291 |
| QUALITY_OS-PKV-2-1 | GRAIN_QUALITY | 291 |
| QUALITY_OS-PKV-2-1 | GRAIN_QUALITY | 291 |

[0616] TABLE 3B
References for the listed quantitative trait loci (QTLs)
listed in Table 3A

| QTL | REFERENCE |
|---|---|
| OS-BDV-1-1 | THEOR APPL GENET (2000) 100:280-284 |
| OS-BDV-12-1 | THEOR APPL GENET (2000) 100:280-284 |
| OS-CSV-1-1 | THEOR APPL GENET (2000) 100:280-284 |
| OS-CPV-1-1 | THEOR APPL GENET (2000) 100:280-284 |
| OS-DTF10-8-2 | MOLECULAR BREEDING (2000) 6:145-155 |
| OS-CHALK-1-1 | THEOR APPL GENET (2000) 101:823-829 |
| OS-LFDRY-4-2 | MOLECULAR BREEDING (2000) 6:55-66 |
| OS-LFDRY-10-1 | MOLECULAR BREEDING (2000) 6:55-66 |
| OS-LFDRY-11-1 | MOLECULAR BREEDING (2000) 6:55-66 |
| OS-PKV-2-1 | THEOR APPL GENET (2000) 100:280-284 |
| OS-PKV-12-1 | THEOR APPL GENET (2000) 100:280-284 |
| OS-RGR-12-1 | MOLECULAR BREEDING (2000) 6:55-66 |
| OS-SBV-1-1 | THEOR APPL GENET (2000) 100:280-284 |
| OS-ST-1-2 | THEOR APPL GENET (2000) 101:1074-1081 |
| OS-LS-2-1 | THEOR APPL GENET (2000) 101:286-291 |
| OS-LS-3-1 | THEOR APPL GENET (2000) 101:286-291 |
| OS-LS-3-3 | THEOR APPL GENET (2000) 101:286-291 |
| OS-SB-2-1 | THEOR APPL GENET (2000) 101:569-573 |
| OS-SB-11-1 | THEOR APPL GENET (2000) 101:569-573 |
| OS-BP-3-1 | THEOR APPL GENET (2001) 102:929-934 |
| OS-RRL-11-1 | THEOR APPL GENET (2001) 102:1002-1010 |
| OS-SSL-10-1 | THEOR APPL GENET (2001) 102:1002-1010 |
| OS-HT-2-2 | THEOR APPL GENET (2001) 102:1236-1242 |
| OS-HT-8-1 | THEOR APPL GENET (2001) 102:1236-1242 |

[0617] TABLE 4A
Sequences associated with the listed rice quantitative trait loci
(QTLs) and showing at least a 2-fold alteration in expression associated
with the listed trait.

| QTL | TRAIT | SEQ ID |
|---|---|---|
| ABIOTIC_STRESS_OS-ALTOL-12-1 | ABIOTIC STRESS | 281 |
| ABIOTIC_STRESS_OS-ALTOL-12-1 | ABIOTIC STRESS | 281 |
| ABIOTIC_STRESS_OS-LFDRY-10-1 | ABIOTIC STRESS | 259 |
| ABIOTIC_STRESS_OS-LFDRY-10-1 | ABIOTIC STRESS | 259 |
| ABIOTIC_STRESS_OS-LFDRY-11-1 | ABIOTIC STRESS | 283 |
| ABIOTIC_STRESS_OS-LFDRY-11-1 | ABIOTIC STRESS | 283 |
| ABIOTIC_STRESS_OS-LFDRY-11-1 | ABIOTIC STRESS | 27 |
| ABIOTIC_STRESS_OS-LFDRY-11-1 | ABIOTIC STRESS | 283 |
| ABIOTIC_STRESS_OS-LFDRY-4-2 | ABIOTIC STRESS | 87 |
| ABIOTIC_STRESS_OS-LFDRY-4-2 | ABIOTIC STRESS | 87 |
| ABIOTIC_STRESS_OS-LFDRY-4-2 | ABIOTIC STRESS | 217 |
| ABIOTIC_STRESS_OS-LFDRY-4-2 | ABIOTIC STRESS | 87 |
| ABIOTIC_STRESS_OS-LFDRY-4-2 | ABIOTIC STRESS | 217 |
| ABIOTIC_STRESS_OS-LFDRY-5-1 | ABIOTIC STRESS | 71 |
| ABIOTIC_STRESS_OS-LFROL-4-1 | ABIOTIC STRESS | 217 |
| ABIOTIC_STRESS_OS-LFROL-4-1 | ABIOTIC STRESS | 217 |
| ABIOTIC_STRESS_OS-LFROL-5-1 | ABIOTIC STRESS | 71 |
| ABIOTIC_STRESS_OS-RGR-12-1 | ABIOTIC STRESS | 233 |
| ABIOTIC_STRESS_OS-RGR-12-1 | ABIOTIC STRESS | 233 |
| ABIOTIC_STRESS_OS-RGR-12-1 | ABIOTIC STRESS | 233 |
| ABIOTIC_STRESS_OS-RGR-12-1 | ABIOTIC STRESS | 27 |
| ABIOTIC_STRESS_OS-RGR-12-1 | ABIOTIC STRESS | 233 |
| ABIOTIC_STRESS_OS-RGR-12-1 | ABIOTIC STRESS | 281 |
| ABIOTIC_STRESS_OS-RGR-12-1 | ABIOTIC STRESS | 281 |
| ABIOTIC_STRESS_OS-RGR-12-1 | ABIOTIC STRESS | 233 |
| ABIOTIC_STRESS_OS-RGR-2-1 | ABIOTIC STRESS | 321 |
| ABIOTIC_STRESS_OS-RGR-2-1 | ABIOTIC STRESS | 305 |
| ABIOTIC_STRESS_OS-RGR-2-1 | ABIOTIC STRESS | 321 |
| ABIOTIC_STRESS_OS-RGR-5-1 | ABIOTIC STRESS | 3 |
| ABIOTIC_STRESS_OS-RGR-5-1 | ABIOTIC STRESS | 3 |
| ABIOTIC_STRESS_OS-RRL-11-1 | ABIOTIC STRESS | 283 |
| ABIOTIC_STRESS_OS-RRL-11-1 | ABIOTIC STRESS | 283 |
| ABIOTIC_STRESS_OS-RRL-11-1 | ABIOTIC STRESS | 283 |
| ABIOTIC_STRESS_OS-RWC-12-1 | ABIOTIC STRESS | 131 |
| ABIOTIC_STRESS_OS-RWC-12-1 | ABIOTIC STRESS | 197 |
| ABIOTIC_STRESS_OS-RWC-12-1 | ABIOTIC STRESS | 197 |
| ABIOTIC_STRESS_OS-RWC-12-1 | ABIOTIC STRESS | 131 |
| ABIOTIC_STRESS_OS-RWC-12-1 | ABIOTIC STRESS | 131 |
| ABIOTIC_STRESS_OS-RWC-6-1 | ABIOTIC STRESS | 191 |
| ABIOTIC_STRESS_OS-SSL-10-1 | ABIOTIC STRESS | 259 |
| ABIOTIC_STRESS_OS-SSL-10-1 | ABIOTIC STRESS | 259 |
| ABIOTIC_STRESS_OS-ST-1-2 | ABIOTIC STRESS | 285 |
| ABIOTIC_STRESS_OS-ST-1-2 | ABIOTIC STRESS | 285 |
| ABIOTIC_STRESS_OS-ST-1-2 | ABIOTIC STRESS | 285 |
| ABIOTIC_STRESS_OS-ST-11-1 | ABIOTIC STRESS | 131 |
| ABIOTIC_STRESS_OS-ST-11-1 | ABIOTIC STRESS | 197 |
| ABIOTIC_STRESS_OS-ST-11-1 | ABIOTIC STRESS | 197 |
| ABIOTIC_STRESS_OS-ST-11-1 | ABIOTIC STRESS | 131 |
| ABIOTIC_STRESS_OS-ST-11-1 | ABIOTIC STRESS | 131 |
| ABIOTIC_STRESS_OS-ST-12-1 | ABIOTIC STRESS | 131 |
| ABIOTIC_STRESS_OS-ST-12-1 | ABIOTIC STRESS | 197 |
| ABIOTIC_STRESS_OS-ST-12-1 | ABIOTIC STRESS | 197 |
| ABIOTIC_STRESS_OS-ST-12-1 | ABIOTIC STRESS | 131 |
| ABIOTIC_STRESS_OS-ST-12-1 | ABIOTIC STRESS | 131 |
| ABIOTIC_STRESS_OS-ST-4-1 | ABIOTIC STRESS | 237 |
| ABIOTIC_STRESS_OS-ST-4-2 | ABIOTIC STRESS | 237 |
| MATURITY_OS-DTF10-2-1 | MATURITY | 321 |
| MATURITY_OS-DTF10-8-2 | MATURITY | 273 |
| MATURITY_OS-DTF10-8-2 | MATURITY | 273 |
| MATURITY_OS-HT-2-2 | MATURITY | 273 |
| MATURITY_OS-HT-2-2 | MATURITY | 273 |
| MATURITY_OS-HT-8-1 | MATURITY | 273 |
| MATURITY_OS-HT-8-1 | MATURITY | 273 |
| PATHOGEN_RESISTANCE_OS-BP-3-1 | PATHOGEN RESISTANCE | 319 |
| PATHOGEN_RESISTANCE_OS-LS-1-1 | PATHOGEN RESISTANCE | 285 |
| PATHOGEN_RESISTANCE_OS-LS-1-1 | PATHOGEN RESISTANCE | 285 |
| PATHOGEN_RESISTANCE_OS-LS-2-1 | PATHOGEN RESISTANCE | 25 |
| PATHOGEN_RESISTANCE_OS-LS-2-1 | PATHOGEN RESISTANCE | 25 |
| PATHOGEN_RESISTANCE_OS-LS-3-1 | PATHOGEN RESISTANCE | 33 |
| PATHOGEN_RESISTANCE_OS-LS-3-3 | PATHOGEN RESISTANCE | 319 |
| PATHOGEN_RESISTANCE_OS-SB-11-1 | PATHOGEN RESISTANCE | 27 |
| PATHOGEN_RESISTANCE_OS-SB-2-1 | PATHOGEN RESISTANCE | 99 |
| QUALITY_OS-BDV-12-1 | GRAIN_QUALITY | 131 |
| QUALITY_OS-BDV-12-1 | GRAIN_QUALITY | 197 |
| QUALITY_OS-BDV-12-1 | GRAIN_QUALITY | 131 |
| QUALITY_OS-BDV-6-1 | GRAIN_QUALITY | 349 |
| QUALITY_OS-BDV-6-1 | GRAIN_QUALITY | 349 |
| QUALITY_OS-CHALK-6-1 | GRAIN_QUALITY | 349 |
| QUALITY_OS-CHALK-6-1 | GRAIN_QUALITY | 349 |
| QUALITY_OS-CPV-6-1 | GRAIN_QUALITY | 349 |
| QUALITY_OS-CPV-6-1 | GRAIN_QUALITY | 349 |
| QUALITY_OS-CPV-6-2 | GRAIN_QUALITY | 349 |
| QUALITY_OS-CPV-6-2 | GRAIN_QUALITY | 349 |
| QUALITY_OS-CSV-6-1 | GRAIN_QUALITY | 349 |
| QUALITY_OS-CSV-6-1 | GRAIN_QUALITY | 349 |
| QUALITY_OS-CSV-6-2 | GRAIN_QUALITY | 349 |
| QUALITY_OS-CSV-6-2 | GRAIN_QUALITY | 349 |
| QUALITY_OS-HPV-6-1 | GRAIN_QUALITY | 349 |
| QUALITY_OS-HPV-6-1 | GRAIN_QUALITY | 349 |
| QUALITY_OS-HPV-6-2 | GRAIN_QUALITY | 349 |
| QUALITY_OS-HPV-6-2 | GRAIN_QUALITY | 349 |
| QUALITY_OS-PKV-12-1 | GRAIN_QUALITY | 131 |
| QUALITY_OS-PKV-12-1 | GRAIN_QUALITY | 197 |
| QUALITY_OS-PKV-12-1 | GRAIN_QUALITY | 131 |
| QUALITY_OS-PKV-2-1 | GRAIN_QUALITY | 291 |
| QUALITY_OS-PKV-2-1 | GRAIN_QUALITY | 291 |
| QUALITY_OS-PKV-2-1 | GRAIN_QUALITY | 291 |
| QUALITY_OS-PKV-2-1 | GRAIN_QUALITY | 291 |
| QUALITY_OS-PKV-2-1 | GRAIN_QUALITY | 291 |
| QUALITY_OS-SBV-6-1 | GRAIN_QUALITY | 349 |
| QUALITY_OS-SBV-6-1 | GRAIN_QUALITY | 349 |
| QUALITY_OS-WC-6-1 | GRAIN_QUALITY | 349 |
| QUALITY_OS-WC-6-1 | GRAIN_QUALITY | 349 |
| YIELD_OS-DM-6-1 | YIELD | 349 |
| YIELD_OS-GP-6-1 | YIELD | 349 |
| YIELD_OS-GW-11-2 | YIELD | 131 |
| YIELD_OS-Y-6-1 | YIELD | 349 |
| YIELD_OS-YLD-11-1 | YIELD | 131 |

[0618] TABLE 4B
References for the listed quantitative trait loci (QTLs)
listed in Table 4A

| OTL | REFERENCE |
|---|---|
| OS-ALTOL-1-1 | THEOR APPL GENET (2000) 100:1295-1303 |
| OS-ALTOL-12-1 | THEOR APPL GENET (2000) 100:1295-1303 |
| OS-BDV-1-1 | THEOR APPL GENET (2000) 100:280-284 |
| OS-BDV-6-1 | THEOR APPL GENET (2000) 100:280-284 |
| OS-BDV-12-1 | THEOR APPL GENET (2000) 100:280-284 |
| OS-CSV-1-1 | THEOR APPL GENET (2000) 100:280-284 |
| OS-CSV-6-1 | THEOR APPL GENET (2000) 100:280-284 |
| OS-CSV-6-2 | THEOR APPL GENET (2000) 100:280-284 |
| OS-CPV-1-1 | THEOR APPL GENET (2000) 100:280-284 |
| OS-CPV-6-1 | THEOR APPL GENET (2000) 100:280-284 |
| OS-CPV-6-2 | THEOR APPL GENET (2000) 100:280-284 |
| OS-DIF10-2-1 | MOLECULAR BREEDING (2000) 6:145-155 |
| OS-DTF10-8-2 | MOLECULAR BREEDING (2000) 6:145-155 |
| OS-CHALK-1-1 | THEOR APPL GENET (2000) 101:823-829 |
| OS-CHALK-6-1 | THEOR APPL GENET (2000) 101:823-829 |
| OS-WC-6-1 | THEOR APPL GENET (2000) 101:823-829 |
| OS-GP-1-1 | THEOR APPL GENET (2000) 101:248-254 |
| OS-GP-6-1 | THEOR APPL GENET (2000) 101:248-254 |
| OS-HPV-6-1 | THEOR APPL GENET (2000) 100:280-284 |
| OS-HPV-6-2 | THEOR APPL GENET (2000) 100:280-284 |
| OS-LFDRY-4-2 | MOLECULAR BREEDING (2000) 6:55-66 |
| OS-LFDRY-5-1 | MOLECULAR BREEDING (2000) 6:55-66 |
| OS-LFDRY-10-1 | MOLECULAR BREEDING (2000) 6:55-66 |
| OS-LFDRY-11-1 | MOLECULAR BREEDING (2000) 6:55-66 |
| OS-LFROL-1-1 | MOLECULAR BREEDING (2000) 6:55-66 |
| OS-LFROL-4-1 | MOLECULAR BREEDING (2000) 6:55-66 |
| OS-LFROL-5-1 | MOLECULAR BREEDING (2000) 6:55-66 |
| OS-PKV-2-1 | THEOR APPL GENET (2000) 100:280-284 |
| OS-PKV-12-1 | THEOR APPL GENET (2000) 100:280-284 |
| OS-RGR-2-1 | MOLECULAR BREEDING (2000) 6:55-66 |
| OS-RGR-5-1 | MOLECULAR BREEDING (2000) 6:55-66 |
| OS-RGR-12-1 | MOLECULAR BREEDING (2000) 6:55-66 |
| OS-RWC-1-2 | MOLECULAR BREEDING (2000) 6:55-66 |
| OS-RWC-6-1 | MOLECULAR BREEDING (2000) 6:55-66 |
| OS-RWC-12-1 | MOLECULAR BREEDING (2000) 6:55-66 |
| OS-SBV-1-1 | THEOR APPL GENET (2000) 100:280-284 |
| OS-SBV-6-1 | THEOR APPL GENET (2000) 100:280-284 |
| OS-ST-1-1 | THEOR APPL GENET (2000) 101:1074-1081 |
| OS-ST-1-2 | THEOR APPL GENET (2000) 101:1074-1081 |
| OS-ST-4-1 | THEOR APPL GENET (2000) 101:1074-1081 |
| OS-ST-4-2 | THEOR APPL GENET (2000) 101:1074-1081 |
| OS-ST-11-1 | THEOR APPL GENET (2000) 101:1074-1081 |
| OS-ST-12-1 | THEOR APPL GENET (2000) 101:1074-1081 |
| OS-LS-1-1 | THEOR APPL GENET (2000) 101:286-291 |
| OS-LS-2-1 | THEOR APPL GENET (2000) 101:286-291 |
| OS-LS-3-1 | THEOR APPL GENET (2000) 101:286-291 |
| OS-LS-3-3 | THEOR APPL GENET (2000) 101:286-291 |
| OS-SB-2-1 | THEOR APPL GENET (2000) 101:569-573 |
| OS-SB-11-1 | THEOR APPL GENET (2000) 101:569-573 |
| OS-Y-6-1 | THEOR APPL GENET (2000) 101:248-254 |
| OS-BP-3-1 | THEOR APPL GENET (2001) 102:929-934 |
| OS-RRL-1-1 | THEOR APPL GENET (2001) 102:1002-1010 |
| OS-RRL-11-1 | THEOR APPL GENET (2001) 102:1002-1010 |
| OS-SRL-1-2 | THEOR APPL GENET (2001) 102:1002-1010 |
| OS-SRL-1-1 | THEOR APPL GENET (2001) 102:1002-1010 |
| OS-SSL-1-2 | THEOR APPL GENET (2001) 102:1002-1010 |
| OS-SSL-10-1 | THEOR APPL GENET (2001) 102:1002-1010 |
| OS-HT-2-2 | THEOR APPL GENET (2001) 102:1236-1242 |
| OS-HT-8-1 | THEOR APPL GENET (2001) 102:1236-1242 |
| OS-GW-1-2 | THEOR APPL GENET (2001) 102:41-52 |
| OS-GW-11-2 | THEOR APPL GENET (2001) 102:41-52 |
| OS-YLD-1-1 | THEOR APPL GENET (2001) 102:41-52 |
| OS-YLD-11-1 | THEOR APPL GENET (2001) 102:41-52 |
| OS-DM-6-1 | PLANT PHYSIOLOGY (2001) 125:406-422 |

[0619] TABLE 5A
Sequences associated with the listed maize quantitative trait loci
(QTLs) and showing at least a 4-fold alteration in expression associated
with the listed trait.

| QTL | TRAIT | SEQ ID |
|---|---|---|
| ABIOTIC_STRESS_ZM-DTOL-4-1 | ABIOTIC STRESS | 25 |
| ABIOTIC_STRESS_ZM-DTOL-4-3 | ABIOTIC STRESS | 25 |
| ABIOTIC_STRESS_ZM-DTOL-9-1 | ABIOTIC STRESS | 99 |
| ABIOTIC_STRESS_ZM-DTOL-9-1 | ABIOTIC STRESS | 99 |
| ABIOTIC_STRESS_ZM-DTOL-9-1 | ABIOTIC STRESS | 331 |
| ABIOTIC_STRESS_ZM-LABA-1-1 | ABIOTIC STRESS | 319 |
| ABIOTIC_STRESS_ZM-LABA-1-1 | ABIOTIC STRESS | 319 |
| ABIOTIC_STRESS_ZM-LABA-1-2 | ABIOTIC STRESS | 285 |
| ABIOTIC_STRESS_ZM-LABA-1-2 | ABIOTIC STRESS | 87 |
| ABIOTIC_STRESS_ZM-LABA-10-2 | ABIOTIC STRESS | 87 |
| ABIOTIC_STRESS_ZM-LABA-2-1 | ABIOTIC STRESS | 87 |
| ABIOTIC_STRESS_ZM-LABA-2-3 | ABIOTIC STRESS | 233 |
| ABIOTIC_STRESS_ZM-LABA-2-3 | ABIOTIC STRESS | 285 |
| ABIOTIC_STRESS_ZM-LABA-2-3 | ABIOTIC STRESS | 233 |
| ABIOTIC_STRESS_ZM-LABA-2-3 | ABIOTIC STRESS | 359 |
| ABIOTIC_STRESS_ZM-LABA-2-3 | ABIOTIC STRESS | 233 |
| ABIOTIC_STRESS_ZM-LABA-2-3 | ABIOTIC STRESS | 359 |
| ABIOTIC_STRESS_ZM-LABA-2-3 | ABIOTIC STRESS | 33 |
| ABIOTIC_STRESS_ZM-LABA-2-4 | ABIOTIC STRESS | 359 |
| ABIOTIC_STRESS_ZM-LABA-2-4 | ABIOTIC STRESS | 359 |
| ABIOTIC_STRESS_ZM-LABA-2-4 | ABIOTIC STRESS | 33 |
| ABIOTIC_STRESS_ZM-LABA-3-1 | ABIOTIC STRESS | 285 |
| ABIOTIC_STRESS_ZM-LABA-3-1 | ABIOTIC STRESS | 257 |
| ABIOTIC_STRESS_ZM-LABA-3-1 | ABIOTIC STRESS | 257 |
| ABIOTIC_STRESS_ZM-LABA-4-1 | ABIOTIC STRESS | 25 |
| ABIOTIC_STRESS_ZM-LABA-4-1 | ABIOTIC STRESS | 273 |
| ABIOTIC_STRESS_ZM-LABA-4-1 | ABIOTIC STRESS | 273 |
| ABIOTIC_STRESS_ZM-LABA-4-1 | ABIOTIC STRESS | 57 |
| ABIOTIC_STRESS_ZM-LABA-4-1 | ABIOTIC STRESS | 273 |
| ABIOTIC_STRESS_ZM-LABA-4-1 | ABIOTIC STRESS | 273 |
| ABIOTIC_STRESS_ZM-LABA-4-1 | ABIOTIC STRESS | 33 |
| ABIOTIC_STRESS_ZM-LABA-4-1 | ABIOTIC STRESS | 57 |
| ABIOTIC_STRESS_ZM-LABA-4-2 | ABIOTIC STRESS | 25 |
| ABIOTIC_STRESS_ZM-LABA-4-2 | ABIOTIC STRESS | 273 |
| ABIOTIC_STRESS_ZM-LABA-4-2 | ABIOTIC STRESS | 273 |
| ABIOTIC_STRESS_ZM-LABA-4-2 | ABIOTIC STRESS | 57 |
| ABIOTIC_STRESS_ZM-LABA-4-2 | ABIOTIC STRESS | 273 |
| ABIOTIC_STRESS_ZM-LABA-4-2 | ABIOTIC STRESS | 273 |
| ABIOTIC_STRESS_ZM-LABA-4-2 | ABIOTIC STRESS | 33 |
| ABIOTIC_STRESS_ZM-LABA-4-2 | ABIOTIC STRESS | 57 |
| ABIOTIC_STRESS_ZM-LABA-7-1 | ABIOTIC STRESS | 87 |
| ABIOTIC_STRESS_ZM-LABA-7-2 | ABIOTIC STRESS | 87 |
| ABIOTIC_STRESS_ZM-LABA-9-1 | ABIOTIC STRESS | 257 |
| ABIOTIC_STRESS_ZM-LABA-9-1 | ABIOTIC STRESS | 319 |
| ABIOTIC_STRESS_ZM-LABA-9-1 | ABIOTIC STRESS | 257 |
| ABIOTIC_STRESS_ZM-LABA-9-1 | ABIOTIC STRESS | 319 |
| GRAIN_PERFORMANCE_MAS12-22 | GRAIN_QUALITY | 25 |
| GRAIN_PERFORMANCE_MAS12-22 | GRAIN_QUALITY | 25 |
| GRAIN_PERFORMANCE_MAS12-23 | GRAIN_QUALITY | 131 |
| GRAIN_PERFORMANCE_MAS12-23 | GRAIN_QUALITY | 263 |
| GRAIN_PERFORMANCE_MAS12-23 | GRAIN_QUALITY | 131 |
| GRAIN_PERFORMANCE_MAS12-23 | GRAIN_QUALITY | 263 |
| GRAIN_PERFORMANCE_MAS12-23 | GRAIN_QUALITY | 263 |
| GRAIN_PERFORMANCE_MAS12-23 | GRAIN_QUALITY | 237 |
| GRAIN_PERFORMANCE_MAS12-24 | GRAIN_QUALITY | 263 |
| GRAIN_PERFORMANCE_MAS12-24 | GRAIN_QUALITY | 257 |
| GRAIN_PERFORMANCE_MAS12-24 | GRAIN_QUALITY | 263 |
| GRAIN_PERFORMANCE_MAS12-24 | GRAIN_QUALITY | 263 |
| GRAIN_PERFORMANCE_MAS12-29 | GRAIN_QUALITY | 281 |
| GRAIN_PERFORMANCE_MAS12-32 | GRAIN_QUALITY | 359 |
| GRAIN_PERFORMANCE_MAS12-32 | GRAIN_QUALITY | 233 |
| GRAIN_PERFORMANCE_MAS12-32 | GRAIN_QUALITY | 281 |
| GRAIN_PERFORMANCE_MAS12-32 | GRAIN_QUALITY | 233 |
| GRAIN_PERFORMANCE_MAS12-32 | GRAIN_QUALITY | 33 |
| GRAIN_PERFORMANCE_MAS12-33 | GRAIN_QUALITY | 87 |
| GRAIN_PERFORMANCE_MAS12-34 | GRAIN_QUALITY | 291 |
| GRAIN_PERFORMANCE_MAS12-34 | GRAIN_QUALITY | 273 |
| GRAIN_PERFORMANCE_MAS12-34 | GRAIN_QUALITY | 273 |
| GRAIN_PERFORMANCE_MAS12-34 | GRAIN_QUALITY | 291 |
| GRAIN_PERFORMANCE_MAS12-34 | GRAIN_QUALITY | 273 |
| GRAIN_PERFORMANCE_MAS12-34 | GRAIN_QUALITY | 57 |
| GRAIN_PERFORMANCE_MAS12-34 | GRAIN_QUALITY | 291 |
| GRAIN_PERFORMANCE_MAS12-34 | GRAIN_QUALITY | 273 |
| GRAIN_PERFORMANCE_MAS12-35 | GRAIN_QUALITY | 25 |
| GRAIN_PERFORMANCE_MAS12-35 | GRAIN_QUALITY | 25 |
| GRAIN_PERFORMANCE_MAS12-35 | GRAIN_QUALITY | 321 |
| GRAIN_PERFORMANCE_MAS12-37 | GRAIN_QUALITY | 25 |
| GRAIN_PERFORMANCE_MAS12-37 | GRAIN_QUALITY | 25 |
| GRAIN_PERFORMANCE_MAS12-38 | GRAIN_QUALITY | 281 |
| GRAIN_PERFORMANCE_MAS12-40 | GRAIN_QUALITY | 87 |
| GRAIN_PERFORMANCE_MAS12-40 | GRAIN_QUALITY | 217 |
| GRAIN_PERFORMANCE_MAS12-40 | GRAIN_QUALITY | 33 |
| GRAIN_PERFORMANCE_MAS12-41 | GRAIN_QUALITY | 359 |
| GRAIN_PERFORMANCE_MAS12-41 | GRAIN_QUALITY | 233 |
| GRAIN_PERFORMANCE_MAS12-41 | GRAIN_QUALITY | 281 |
| GRAIN_PERFORMANCE_MAS12-41 | GRAIN_QUALITY | 233 |
| GRAIN_PERFORMANCE_MAS12-41 | GRAIN_QUALITY | 33 |
| GRAIN_PERFORMANCE_MAS12-42 | GRAIN_QUALITY | 57 |
| GRAIN_PERFORMANCE_MAS12-43 | GRAIN_QUALITY | 131 |
| GRAIN_PERFORMANCE_MAS12-43 | GRAIN_QUALITY | 131 |
| GRAIN_PERFORMANCE_MAS12-44 | GRAIN_QUALITY | 321 |
| GRAIN_PERFORMANCE_MAS12-47 | GRAIN_QUALITY | 131 |
| GRAIN_PERFORMANCE_MAS12-47 | GRAIN_QUALITY | 263 |
| GRAIN_PERFORMANCE_MAS12-47 | GRAIN_QUALITY | 131 |
| GRAIN_PERFORMANCE_MAS12-47 | GRAIN_QUALITY | 263 |
| GRAIN_PERFORMANCE_MAS12-47 | GRAIN_QUALITY | 263 |
| GRAIN_PERFORMANCE_MAS12-47 | GRAIN_QUALITY | 237 |
| GRAIN_PERFORMANCE_MAS12-58 | GRAIN_QUALITY | 291 |
| GRAIN_PERFORMANCE_MAS12-58 | GRAIN_QUALITY | 273 |
| GRAIN_PERFORMANCE_MAS12-58 | GRAIN_QUALITY | 25 |
| GRAIN_PERFORMANCE_MAS12-58 | GRAIN_QUALITY | 273 |
| GRAIN_PERFORMANCE_MAS12-58 | GRAIN_QUALITY | 291 |
| GRAIN_PERFORMANCE_MAS12-58 | GRAIN_QUALITY | 273 |
| GRAIN_PERFORMANCE_MAS12-58 | GRAIN_QUALITY | 25 |
| GRAIN_PERFORMANCE_MAS12-58 | GRAIN_QUALITY | 57 |
| GRAIN_PERFORMANCE_MAS12-58 | GRAIN_QUALITY | 291 |
| GRAIN_PERFORMANCE_MAS12-58 | GRAIN_QUALITY | 273 |
| GRAIN_PERFORMANCE_MAS12-58 | GRAIN_QUALITY | 33 |
| GRAIN_PERFORMANCE_MAS13-41 | GRAIN_QUALITY | 319 |
| GRAIN_PERFORMANCE_MAS13-43 | GRAIN_QUALITY | 131 |
| GRAIN_PERFORMANCE_MAS13-43 | GRAIN_QUALITY | 87 |
| GRAIN_PERFORMANCE_MAS13-43 | GRAIN_QUALITY | 331 |
| GRAIN_PERFORMANCE_MAS13-43 | GRAIN_QUALITY | 131 |
| GRAIN_PERFORMANCE_MAS13-43 | GRAIN_QUALITY | 319 |
| GRAIN_PERFORMANCE_MAS13-44 | GRAIN_QUALITY | 319 |
| GRAIN_PERFORMANCE_MAS13-56 | GRAIN_QUALITY | 99 |
| GRAIN_PERFORMANCE_MAS13-56 | GRAIN_QUALITY | 331 |
| GRAIN_PERFORMANCE_MAS16-1 | GRAIN_QUALITY | 319 |
| GRAIN_PERFORMANCE_MAS16-10 | GRAIN_QUALITY | 87 |
| GRAIN_PERFORMANCE_MAS16-10 | GRAIN_QUALITY | 217 |
| GRAIN_PERFORMANCE_MAS16-11 | GRAIN_QUALITY | 281 |
| GRAIN_PERFORMANCE_MAS16-12 | GRAIN_QUALITY | 59 |
| GRAIN_PERFORMANCE_MAS16-13 | GRAIN_QUALITY | 87 |
| GRAIN_PERFORMANCE_MAS16-4 | GRAIN_QUALITY | 87 |
| GRAIN_PERFORMANCE_MAS16-6 | GRAIN_QUALITY | 321 |
| GRAIN_PERFORMANCE_MAS16-8 | GRAIN_QUALITY | 281 |
| GRAIN_PERFORMANCE_MAS19-1 | GRAIN_QUALITY | 319 |
| GRAIN_PERFORMANCE_MAS19-10 | GRAIN_QUALITY | 291 |
| GRAIN_PERFORMANCE_MAS19-10 | GRAIN_QUALITY | 87 |
| GRAIN_PERFORMANCE_MAS19-10 | GRAIN_QUALITY | 291 |
| GRAIN_PERFORMANCE_MAS19-10 | GRAIN_QUALITY | 291 |
| GRAIN_PERFORMANCE_MAS19-13 | GRAIN_QUALITY | 281 |
| GRAIN_PERFORMANCE_MAS19-2 | GRAIN_QUALITY | 87 |
| GRAIN_PERFORMANCE_MAS19-2 | GRAIN_QUALITY | 217 |
| GRAIN_PERFORMANCE_MAS19-5 | GRAIN_QUALITY | 87 |
| GRAIN_PERFORMANCE_MAS19-6 | GRAIN_QUALITY | 87 |
| GRAIN_PERFORMANCE_MAS19-7 | GRAIN_QUALITY | 87 |
| GRAIN_PERFORMANCE_MAS19-7 | GRAIN_QUALITY | 331 |
| GRAIN_PERFORMANCE_MAS19-7 | GRAIN_QUALITY | 57 |
| GRAIN_PERFORMANCE_MAS19-7 | GRAIN_QUALITY | 217 |
| GRAIN_PERFORMANCE_MAS19-8 | GRAIN_QUALITY | 87 |
| GRAIN_PERFORMANCE_MAS19-8 | GRAIN_QUALITY | 331 |
| GRAIN_PERFORMANCE_MAS19-8 | GRAIN_QUALITY | 57 |
| GRAIN_PERFORMANCE_MAS19-8 | GRAIN_QUALITY | 217 |
| GRAIN_PERFORMANCE_MAS19-9 | GRAIN_QUALITY | 99 |
| GRAIN_PERFORMANCE_MAS19-9 | GRAIN_QUALITY | 331 |
| GRAIN_PERFORMANCE_MAS20-1 | GRAIN_QUALITY | 321 |
| GRAIN_PERFORMANCE_MAS20-2 | GRAIN_QUALITY | 359 |
| GRAIN_PERFORMANCE_MAS20-2 | GRAIN_QUALITY | 233 |
| GRAIN_PERFORMANCE_MAS20-2 | GRAIN_QUALITY | 281 |
| GRAIN_PERFORMANCE_MAS20-2 | GRAIN_QUALITY | 233 |
| GRAIN_PERFORMANCE_MAS20-2 | GRAIN_QUALITY | 33 |
| GRAIN_PERFORMANCE_MAS20-24 | GRAIN_QUALITY | 87 |
| GRAIN_PERFORMANCE_MAS20-3 | GRAIN_QUALITY | 57 |
| GRAIN_PERFORMANCE_MAS20-4 | GRAIN_QUALITY | 57 |
| GRAIN_PERFORMANCE_MAS20-5 | GRAIN_QUALITY | 87 |
| GRAIN_PERFORMANCE_MAS20-5 | GRAIN_QUALITY | 217 |
| GRAIN_PERFORMANCE_MAS20-6 | GRAIN_QUALITY | 87 |
| GRAIN_PERFORMANCE_MAS20-6 | GRAIN_QUALITY | 217 |
| GRAIN_PERFORMANCE_MAS20-7 | GRAIN_QUALITY | 131 |
| GRAIN_PERFORMANCE_MAS20-7 | GRAIN_QUALITY | 87 |
| GRAIN_PERFORMANCE_MAS20-7 | GRAIN_QUALITY | 331 |
| GRAIN_PERFORMANCE_MAS20-7 | GRAIN_QUALITY | 131 |
| GRAIN_PERFORMANCE_MAS20-7 | GRAIN_QUALITY | 237 |
| GRAIN_PERFORMANCE_MAS20-7 | GRAIN_QUALITY | 319 |
| GRAIN_PERFORMANCE_MAS20-8 | GRAIN_QUALITY | 319 |
| GRAIN_PERFORMANCE_MAS20-9 | GRAIN_QUALITY | 217 |
| GRAIN_PERFORMANCE_MAS21-1 | GRAIN_QUALITY | 87 |
| GRAIN_PERFORMANCE_MAS21-12 | GRAIN_QUALITY | 87 |
| GRAIN_PERFORMANCE_MAS21-12 | GRAIN_QUALITY | 217 |
| GRAIN_PERFORMANCE_MAS21-2 | GRAIN_QUALITY | 87 |
| GRAIN_PERFORMANCE_MAS21-4 | GRAIN_QUALITY | 87 |
| GRAIN_PERFORMANCE_MAS21-4 | GRAIN_QUALITY | 217 |
| GRAIN_PERFORMANCE_MAS21-5 | GRAIN_QUALITY | 281 |
| GRAIN_PERFORMANCE_MAS21-6 | GRAIN_QUALITY | 291 |
| GRAIN_PERFORMANCE_MAS21-6 | GRAIN_QUALITY | 291 |
| GRAIN_PERFORMANCE_MAS21-6 | GRAIN_QUALITY | 291 |
| GRAIN_PERFORMANCE_MAS21-7 | GRAIN_QUALITY | 291 |
| GRAIN_PERFORMANCE_MAS21-7 | GRAIN_QUALITY | 291 |
| GRAIN_PERFORMANCE_MAS21-7 | GRAIN_QUALITY | 291 |
| GRAIN_PERFORMANCE_MAS21-9 | GRAIN_QUALITY | 25 |
| GRAIN_PERFORMANCE_MAS21-9 | GRAIN_QUALITY | 25 |
| GRAIN_PERFORMANCE_MAS22-1 | GRAIN_QUALITY | 131 |
| GRAIN_PERFORMANCE_MAS22-1 | GRAIN_QUALITY | 263 |
| GRAIN_PERFORMANCE_MAS22-1 | GRAIN_QUALITY | 131 |
| GRAIN_PERFORMANCE_MAS22-1 | GRAIN_QUALITY | 263 |
| GRAIN_PERFORMANCE_MAS22-1 | GRAIN_QUALITY | 263 |
| GRAIN_PERFORMANCE_MAS22-1 | GRAIN_QUALITY | 237 |
| GRAIN_PERFORMANCE_MAS22-17 | GRAIN_QUALITY | 87 |
| GRAIN_PERFORMANCE_MAS22-18 | GRAIN_QUALITY | 87 |
| GRAIN_PERFORMANCE_MAS22-19 | GRAIN_QUALITY | 87 |
| GRAIN_PERFORMANCE_MAS22-2 | GRAIN_QUALITY | 291 |
| GRAIN_PERFORMANCE_MAS22-2 | GRAIN_QUALITY | 273 |
| GRAIN_PERFORMANCE_MAS22-2 | GRAIN_QUALITY | 273 |
| GRAIN_PERFORMANCE_MAS22-2 | GRAIN_QUALITY | 291 |
| GRAIN_PERFORMANCE_MAS22-2 | GRAIN_QUALITY | 273 |
| GRAIN_PERFORMANCE_MAS22-2 | GRAIN_QUALITY | 57 |
| GRAIN_PERFORMANCE_MAS22-2 | GRAIN_QUALITY | 291 |
| GRAIN_PERFORMANCE_MAS22-2 | GRAIN_QUALITY | 273 |
| GRAIN_PERFORMANCE_MAS22-20 | GRAIN_QUALITY | 291 |
| GRAIN_PERFORMANCE_MAS22-20 | GRAIN_QUALITY | 291 |
| GRAIN_PERFORMANCE_MAS22-20 | GRAIN_QUALITY | 291 |
| GRAIN_PERFORMANCE_MAS22-21 | GRAIN_QUALITY | 291 |
| GRAIN_PERFORMANCE_MAS22-21 | GRAIN_QUALITY | 291 |
| GRAIN_PERFORMANCE_MAS22-21 | GRAIN_QUALITY | 291 |
| GRAIN_PERFORMANCE_MAS22-3 | GRAIN_QUALITY | 291 |
| GRAIN_PERFORMANCE_MAS22-3 | GRAIN_QUALITY | 273 |
| GRAIN_PERFORMANCE_MAS22-3 | GRAIN_QUALITY | 273 |
| GRAIN_PERFORMANCE_MAS22-3 | GRAIN_QUALITY | 291 |
| GRAIN_PERFORMANCE_MAS22-3 | GRAIN_QUALITY | 273 |
| GRAIN_PERFORMANCE_MAS22-3 | GRAIN_QUALITY | 57 |
| GRAIN_PERFORMANCE_MAS22-3 | GRAIN_QUALITY | 291 |
| GRAIN_PERFORMANCE_MAS22-3 | GRAIN_QUALITY | 273 |
| GRAIN_PERFORMANCE_MAS22-4 | GRAIN_QUALITY | 291 |
| GRAIN_PERFORMANCE_MAS22-4 | GRAIN_QUALITY | 273 |
| GRAIN_PERFORMANCE_MAS22-4 | GRAIN_QUALITY | 273 |
| GRAIN_PERFORMANCE_MAS22-4 | GRAIN_QUALITY | 291 |
| GRAIN_PERFORMANCE_MAS22-4 | GRAIN_QUALITY | 273 |
| GRAIN_PERFORMANCE_MAS22-4 | GRAIN_QUALITY | 57 |
| GRAIN_PERFORMANCE_MAS22-4 | GRAIN_QUALITY | 291 |
| GRAIN_PERFORMANCE_MAS22-4 | GRAIN_QUALITY | 273 |
| GRAIN_PERFORMANCE_MAS22-5 | GRAIN_QUALITY | 319 |
| GRAIN_PERFORMANCE_MAS22-6 | GRAIN_QUALITY | 319 |
| GRAIN_PERFORMANCE_MAS22-7 | GRAIN_QUALITY | 131 |
| GRAIN_PERFORMANCE_MAS22-7 | GRAIN_QUALITY | 263 |
| GRAIN_PERFORMANCE_MAS22-7 | GRAIN_QUALITY | 131 |
| GRAIN_PERFORMANCE_MAS22-7 | GRAIN_QUALITY | 257 |
| GRAIN_PERFORMANCE_MAS22-7 | GRAIN_QUALITY | 263 |
| GRAIN_PERFORMANCE_MAS22-7 | GRAIN_QUALITY | 321 |
| GRAIN_PERFORMANCE_MAS22-7 | GRAIN_QUALITY | 263 |
| GRAIN_PERFORMANCE_MAS22-7 | GRAIN_QUALITY | 237 |
| GRAIN_PERFORMANCE_MAS22-8 | GRAIN_QUALITY | 131 |
| GRAIN_PERFORMANCE_MAS22-8 | GRAIN_QUALITY | 263 |
| GRAIN_PERFORMANCE_MAS22-8 | GRAIN_QUALITY | 131 |
| GRAIN_PERFORMANCE_MAS22-8 | GRAIN_QUALITY | 257 |
| GRAIN_PERFORMANCE_MAS22-8 | GRAIN_QUALITY | 263 |
| GRAIN_PERFORMANCE_MAS22-8 | GRAIN_QUALITY | 321 |
| GRAIN_PERFORMANCE_MAS22-8 | GRAIN_QUALITY | 263 |
| GRAIN_PERFORMANCE_MAS22-8 | GRAIN_QUALITY | 237 |
| GRAIN_PERFORMANCE_MAS22-9 | GRAIN_QUALITY | 131 |
| GRAIN_PERFORMANCE_MAS22-9 | GRAIN_QUALITY | 131 |
| GRAIN_PERFORMANCE_MAS22-9 | GRAIN_QUALITY | 237 |
| GRAIN_PERFORMANCE_MAS23-11 | GRAIN_QUALITY | 263 |
| GRAIN_PERFORMANCE_MAS23-11 | GRAIN_QUALITY | 331 |
| GRAIN_PERFORMANCE_MAS23-11 | GRAIN_QUALITY | 263 |
| GRAIN_PERFORMANCE_MAS23-11 | GRAIN_QUALITY | 263 |
| GRAIN_PERFORMANCE_MAS23-12 | GRAIN_QUALITY | 319 |
| GRAIN_PERFORMANCE_MAS23-20 | GRAIN_QUALITY | 319 |
| GRAIN_PERFORMANCE_MAS23-21 | GRAIN_QUALITY | 319 |
| GRAIN_PERFORMANCE_MAS23-22 | GRAIN_QUALITY | 319 |
| GRAIN_PERFORMANCE_MAS23-4 | GRAIN_QUALITY | 87 |
| GRAIN_PERFORMANCE_MAS23-4 | GRAIN_QUALITY | 331 |
| GRAIN_PERFORMANCE_MAS23-4 | GRAIN_QUALITY | 57 |
| GRAIN_PERFORMANCE_MAS23-4 | GRAIN_QUALITY | 217 |
| GRAIN_PERFORMANCE_MAS23-5 | GRAIN_QUALITY | 291 |
| GRAIN_PERFORMANCE_MAS23-5 | GRAIN_QUALITY | 291 |
| GRAIN_PERFORMANCE_MAS23-5 | GRAIN_QUALITY | 291 |
| GRAIN_PERFORMANCE_MAS23-6 | GRAIN_QUALITY | 281 |
| GRAIN_PERFORMANCE_MAS23-7 | GRAIN_QUALITY | 87 |
| GRAIN_PERFORMANCE_MAS23-8 | GRAIN_QUALITY | 87 |
| GRAIN_PERFORMANCE_MAS24-23 | GRAIN_QUALITY | 319 |
| GRAIN_PERFORMANCE_MAS24-24 | GRAIN_QUALITY | 319 |
| GRAIN_PERFORMANCE_MAS24-25 | GRAIN_QUALITY | 131 |
| GRAIN_PERFORMANCE_MAS24-25 | GRAIN_QUALITY | 263 |
| GRAIN_PERFORMANCE_MAS24-25 | GRAIN_QUALITY | 131 |
| GRAIN_PERFORMANCE_MAS24-25 | GRAIN_QUALITY | 257 |
| GRAIN_PERFORMANCE_MAS24-25 | GRAIN_QUALITY | 263 |
| GRAIN_PERFORMANCE_MAS24-25 | GRAIN_QUALITY | 263 |
| GRAIN_PERFORMANCE_MAS24-25 | GRAIN_QUALITY | 237 |
| GRAIN_PERFORMANCE_MAS24-26 | GRAIN_QUALITY | 87 |
| GRAIN_PERFORMANCE_MAS25-1 | GRAIN_QUALITY | 263 |
| GRAIN_PERFORMANCE_MAS25-1 | GRAIN_QUALITY | 331 |
| GRAIN_PERFORMANCE_MAS25-1 | GRAIN_QUALITY | 263 |
| GRAIN_PERFORMANCE_MAS25-1 | GRAIN_QUALITY | 263 |
| GRAIN_PERFORMANCE_MAS25-13 | GRAIN_QUALITY | 57 |
| GRAIN_PERFORMANCE_MAS25-14 | GRAIN_QUALITY | 57 |
| GRAIN_PERFORMANCE_MAS25-17 | GRAIN_QUALITY | 87 |
| GRAIN_PERFORMANCE_MAS25-19 | GRAIN_QUALITY | 319 |
| GRAIN_PERFORMANCE_MAS25-2 | GRAIN_QUALITY | 291 |
| GRAIN_PERFORMANCE_MAS25-2 | GRAIN_QUALITY | 291 |
| GRAIN_PERFORMANCE_MAS25-2 | GRAIN_QUALITY | 291 |
| GRAIN_PERFORMANCE_MAS25-20 | GRAIN_QUALITY | 319 |
| GRAIN_PERFORMANCE_MAS25-21 | GRAIN_QUALITY | 281 |
| GRAIN_PERFORMANCE_MAS25-22 | GRAIN_QUALITY | 87 |
| GRAIN_PERFORMANCE_MAS25-23 | GRAIN_QUALITY | 131 |
| GRAIN_PERFORMANCE_MAS25-23 | GRAIN_QUALITY | 25 |
| GRAIN_PERFORMANCE_MAS25-23 | GRAIN_QUALITY | 131 |
| GRAIN_PERFORMANCE_MAS25-23 | GRAIN_QUALITY | 25 |
| GRAIN_PERFORMANCE_MAS25-31 | GRAIN_QUALITY | 131 |
| GRAIN_PERFORMANCE_MAS25-31 | GRAIN_QUALITY | 263 |
| GRAIN_PERFORMANCE_MAS25-31 | GRAIN_QUALITY | 131 |
| GRAIN_PERFORMANCE_MAS25-31 | GRAIN_QUALITY | 257 |
| GRAIN_PERFORMANCE_MAS25-31 | GRAIN_QUALITY | 263 |
| GRAIN_PERFORMANCE_MAS25-31 | GRAIN_QUALITY | 321 |
| GRAIN_PERFORMANCE_MAS25-31 | GRAIN_QUALITY | 263 |
| GRAIN_PERFORMANCE_MAS25-31 | GRAIN_QUALITY | 237 |
| GRAIN_PERFORMANCE_MAS25-34 | GRAIN_QUALITY | 99 |
| GRAIN_PERFORMANCE_MAS25-34 | GRAIN_QUALITY | 331 |
| GRAIN_PERFORMANCE_MAS25-36 | GRAIN_QUALITY | 291 |
| GRAIN_PERFORMANCE_MAS25-36 | GRAIN_QUALITY | 291 |
| GRAIN_PERFORMANCE_MAS25-36 | GRAIN_QUALITY | 291 |
| GRAIN_PERFORMANCE_MAS25-37 | GRAIN_QUALITY | 57 |
| GRAIN_PERFORMANCE_MAS25-39 | GRAIN_QUALITY | 57 |
| GRAIN_PERFORMANCE_MAS25-4 | GRAIN_QUALITY | 25 |
| GRAIN_PERFORMANCE_MAS25-4 | GRAIN_QUALITY | 25 |
| GRAIN_PERFORMANCE_MAS25-43 | GRAIN_QUALITY | 257 |
| GRAIN_PERFORMANCE_MAS25-48 | GRAIN_QUALITY | 319 |
| GRAIN_PERFORMANCE_MAS25-5 | GRAIN_QUALITY | 131 |
| GRAIN_PERFORMANCE_MAS25-5 | GRAIN_QUALITY | 87 |
| GRAIN_PERFORMANCE_MAS25-5 | GRAIN_QUALITY | 331 |
| GRAIN_PERFORMANCE_MAS25-5 | GRAIN_QUALITY | 131 |
| GRAIN_PERFORMANCE_MAS25-5 | GRAIN_QUALITY | 319 |
| GRAIN_PERFORMANCE_MAS25-6 | GRAIN_QUALITY | 87 |
| GRAIN_PERFORMANCE_MAS25-7 | GRAIN_QUALITY | 319 |
| GRAIN_PERFORMANCE_MAS25-9 | GRAIN_QUALITY | 87 |
| GRAIN_PERFORMANCE_MAS27-1 | GRAIN_QUALITY | 57 |
| GRAIN_PERFORMANCE_MAS27-11 | GRAIN_QUALITY | 291 |
| GRAIN_PERFORMANCE_MAS27-11 | GRAIN_QUALITY | 87 |
| GRAIN_PERFORMANCE_MAS27-11 | GRAIN_QUALITY | 291 |
| GRAIN_PERFORMANCE_MAS27-11 | GRAIN_QUALITY | 291 |
| GRAIN_PERFORMANCE_MAS27-12 | GRAIN_QUALITY | 257 |
| GRAIN_PERFORMANCE_MAS27-14 | GRAIN_QUALITY | 87 |
| GRAIN_PERFORMANCE_MAS27-16 | GRAIN_QUALITY | 87 |
| GRAIN_PERFORMANCE_MAS27-19 | GRAIN_QUALITY | 57 |
| GRAIN_PERFORMANCE_MAS27-2 | GRAIN_QUALITY | 87 |
| GRAIN_PERFORMANCE_MAS27-6 | GRAIN_QUALITY | 131 |
| GRAIN_PERFORMANCE_MAS27-6 | GRAIN_QUALITY | 263 |
| GRAIN_PERFORMANCE_MAS27-6 | GRAIN_QUALITY | 131 |
| GRAIN_PERFORMANCE_MAS27-6 | GRAIN_QUALITY | 257 |
| GRAIN_PERFORMANCE_MAS27-6 | GRAIN_QUALITY | 263 |
| GRAIN_PERFORMANCE_MAS27-6 | GRAIN_QUALITY | 263 |
| GRAIN_PERFORMANCE_MAS27-6 | GRAIN_QUALITY | 237 |
| GRAIN_PERFORMANCE_MAS27-7 | GRAIN_QUALITY | 131 |
| GRAIN_PERFORMANCE_MAS27-7 | GRAIN_QUALITY | 87 |
| GRAIN_PERFORMANCE_MAS27-7 | GRAIN_QUALITY | 331 |
| GRAIN_PERFORMANCE_MAS27-7 | GRAIN_QUALITY | 131 |
| GRAIN_PERFORMANCE_MAS27-7 | GRAIN_QUALITY | 319 |
| GRAIN_PERFORMANCE_MAS27-8 | GRAIN_QUALITY | 291 |
| GRAIN_PERFORMANCE_MAS27-8 | GRAIN_QUALITY | 291 |
| GRAIN_PERFORMANCE_MAS27-8 | GRAIN_QUALITY | 291 |
| GRAIN_PERFORMANCE_MAS27-9 | GRAIN_QUALITY | 87 |
| GRAIN_PERFORMANCE_MAS27-9 | GRAIN_QUALITY | 331 |
| GRAIN_PERFORMANCE_MAS27-9 | GRAIN_QUALITY | 57 |
| GRAIN_PERFORMANCE_MAS27-9 | GRAIN_QUALITY | 217 |
| GRAIN_PERFORMANCE_SMS015-1 | GRAIN_QUALITY | 257 |
| GRAIN_PERFORMANCE_SMS015-2 | GRAIN_QUALITY | 57 |
| GRAIN_PERFORMANCE_SMS015-37 | GRAIN_QUALITY | 87 |
| GRAIN_PERFORMANCE_SMS015-37 | GRAIN_QUALITY | 217 |
| GRAIN_PERFORMANCE_SMS015-38 | GRAIN_QUALITY | 263 |
| GRAIN_PERFORMANCE_SMS015-38 | GRAIN_QUALITY | 263 |
| GRAIN_PERFORMANCE_SMS015-38 | GRAIN_QUALITY | 263 |
| GRAIN_PERFORMANCE_SMS015-39 | GRAIN_QUALITY | 281 |
| GRAIN_PERFORMANCE_SMS015-41 | GRAIN_QUALITY | 291 |
| GRAIN_PERFORMANCE_SMS015-41 | GRAIN_QUALITY | 273 |
| GRAIN_PERFORMANCE_SMS015-41 | GRAIN_QUALITY | 25 |
| GRAIN_PERFORMANCE_SMS015-41 | GRAIN_QUALITY | 273 |
| GRAIN_PERFORMANCE_SMS015-41 | GRAIN_QUALITY | 291 |
| GRAIN_PERFORMANCE_SMS015-41 | GRAIN_QUALITY | 273 |
| GRAIN_PERFORMANCE_SMS015-41 | GRAIN_QUALITY | 25 |
| GRAIN_PERFORMANCE_SMS015-41 | GRAIN_QUALITY | 57 |
| GRAIN_PERFORMANCE_SMS015-41 | GRAIN_QUALITY | 291 |
| GRAIN_PERFORMANCE_SMS015-41 | GRAIN_QUALITY | 273 |
| GRAIN_PERFORMANCE_SMS015-41 | GRAIN_QUALITY | 33 |
| GRAIN_PERFORMANCE_SMS015-42 | GRAIN_QUALITY | 263 |
| GRAIN_PERFORMANCE_SMS015-42 | GRAIN_QUALITY | 331 |
| GRAIN_PERFORMANCE_SMS015-42 | GRAIN_QUALITY | 263 |
| GRAIN_PERFORMANCE_SMS015-42 | GRAIN_QUALITY | 263 |
| GRAIN_PERFORMANCE_SMS015-51 | GRAIN_QUALITY | 87 |
| GRAIN_PERFORMANCE_SMS021-21 | GRAIN_QUALITY | 359 |
| GRAIN_PERFORMANCE_SMS021-21 | GRAIN_QUALITY | 233 |
| GRAIN_PERFORMANCE_SMS021-21 | GRAIN_QUALITY | 281 |
| GRAIN_PERFORMANCE_SMS021-21 | GRAIN_QUALITY | 233 |
| GRAIN_PERFORMANCE_SMS021-21 | GRAIN_QUALITY | 33 |
| GRAIN_PERFORMANCE_SMS021-38 | GRAIN_QUALITY | 217 |
| GRAIN_PERFORMANCE_SMS021-39 | GRAIN_QUALITY | 39 |
| GRAIN_PERFORMANCE_SMS021-41 | GRAIN_QUALITY | 131 |
| GRAIN_PERFORMANCE_SMS021-41 | GRAIN_QUALITY | 263 |
| GRAIN_PERFORMANCE_SMS021-41 | GRAIN_QUALITY | 131 |
| GRAIN_PERFORMANCE_SMS021-41 | GRAIN_QUALITY | 263 |
| GRAIN_PERFORMANCE_SMS021-41 | GRAIN_QUALITY | 263 |
| GRAIN_PERFORMANCE_SMS021-41 | GRAIN_QUALITY | 237 |
| GRAIN_PERFORMANCE_SMS021-42 | GRAIN_QUALITY | 87 |
| GRAIN_PERFORMANCE_SMS021-43 | GRAIN_QUALITY | 39 |
| GRAIN_PERFORMANCE_SMS021-44 | GRAIN_QUALITY | 321 |
| GRAIN_PERFORMANCE_SMS021-45 | GRAIN_QUALITY | 131 |
| GRAIN_PERFORMANCE_SMS021-45 | GRAIN_QUALITY | 131 |
| GRAIN_PERFORMANCE_SMS021-45 | GRAIN_QUALITY | 257 |
| GRAIN_PERFORMANCE_SMS021-45 | GRAIN_QUALITY | 319 |
| GRAIN_PERFORMANCE_SMS021-46 | GRAIN_QUALITY | 87 |
| GRAIN_PERFORMANCE_SMS021-46 | GRAIN_QUALITY | 217 |
| GRAIN_PERFORMANCE_SMS021-48 | GRAIN_QUALITY | 87 |
| GRAIN_PERFORMANCE_SMS021-50 | GRAIN_QUALITY | 25 |
| GRAIN_PERFORMANCE_SMS021-50 | GRAIN_QUALITY | 25 |
| GRAIN_PERFORMANCE_SMS021-69 | GRAIN_QUALITY | 359 |
| GRAIN_PERFORMANCE_SMS021-69 | GRAIN_QUALITY | 233 |
| GRAIN_PERFORMANCE_SMS021-69 | GRAIN_QUALITY | 281 |
| GRAIN_PERFORMANCE_SMS021-69 | GRAIN_QUALITY | 233 |
| GRAIN_PERFORMANCE_SMS021-69 | GRAIN_QUALITY | 33 |
| GRAIN_PERFORMANCE_SMS021-70 | GRAIN_QUALITY | 57 |
| GRAIN_PERFORMANCE_SMS021-71 | GRAIN_QUALITY | 25 |
| GRAIN_PERFORMANCE_SMS021-71 | GRAIN_QUALITY | 25 |
| GRAIN_PERFORMANCE_SMS021-72 | GRAIN_QUALITY | 281 |
| GRAIN_PERFORMANCE_SMS021-82 | GRAIN_QUALITY | 319 |
| GRAIN_PERFORMANCE_SMS021-83 | GRAIN_QUALITY | 319 |
| GRAIN_QUALITY_MAS12-18 | GRAIN_QUALITY | 131 |
| GRAIN_QUALITY_MAS12-18 | GRAIN_QUALITY | 263 |
| GRAIN_QUALITY_MAS12-18 | GRAIN_QUALITY | 131 |
| GRAIN_QUALITY_MAS12-18 | GRAIN_QUALITY | 263 |
| GRAIN_QUALITY_MAS12-18 | GRAIN_QUALITY | 263 |
| GRAIN_QUALITY_MAS12-18 | GRAIN_QUALITY | 237 |
| GRAIN_QUALITY_MAS13-22 | GRAIN_QUALITY | 87 |
| GRAIN_QUALITY_MAS13-24 | GRAIN_QUALITY | 257 |
| GRAIN_QUALITY_MAS13-31 | GRAIN_QUALITY | 87 |
| GRAIN_QUALITY_MAS13-32 | GRAIN_QUALITY | 87 |
| GRAIN_QUALITY_MAS13-32 | GRAIN_QUALITY | 217 |
| GRAIN_QUALITY_MAS19-14 | GRAIN_QUALITY | 319 |
| GRAIN_QUALITY_MAS24-16 | GRAIN_QUALITY | 131 |
| GRAIN_QUALITY_MAS24-16 | GRAIN_QUALITY | 263 |
| GRAIN_QUALITY_MAS24-16 | GRAIN_QUALITY | 131 |
| GRAIN_QUALITY_MAS24-16 | GRAIN_QUALITY | 263 |
| GRAIN_QUALITY_MAS24-16 | GRAIN_QUALITY | 263 |
| GRAIN_QUALITY_MAS24-16 | GRAIN_QUALITY | 237 |
| GRAIN_QUALITY_MAS24-2 | GRAIN_QUALITY | 87 |
| GRAIN_QUALITY_MAS24-2 | GRAIN_QUALITY | 331 |
| GRAIN_QUALITY_MAS24-2 | GRAIN_QUALITY | 57 |
| GRAIN_QUALITY_MAS24-2 | GRAIN_QUALITY | 217 |
| GRAIN_QUALITY_MAS24-21 | GRAIN_QUALITY | 25 |
| GRAIN_QUALITY_MAS24-21 | GRAIN_QUALITY | 25 |
| GRAIN_QUALITY_MAS24-21 | GRAIN_QUALITY | 321 |
| GRAIN_QUALITY_MAS24-28 | GRAIN_QUALITY | 291 |
| GRAIN_QUALITY_MAS24-28 | GRAIN_QUALITY | 291 |
| GRAIN_QUALITY_MAS24-28 | GRAIN_QUALITY | 291 |
| GRAIN_QUALITY_MAS24-3 | GRAIN_QUALITY | 217 |
| GRAIN_QUALITY_SMS015-16 | GRAIN_QUALITY | 131 |
| GRAIN_QUALITY_SMS015-16 | GRAIN_QUALITY | 263 |
| GRAIN_QUALITY_SMS015-16 | GRAIN_QUALITY | 131 |
| GRAIN_QUALITY_SMS015-16 | GRAIN_QUALITY | 257 |
| GRAIN_QUALITY_SMS015-16 | GRAIN_QUALITY | 263 |
| GRAIN_QUALITY_SMS015-16 | GRAIN_QUALITY | 321 |
| GRAIN_QUALITY_SMS015-16 | GRAIN_QUALITY | 263 |
| GRAIN_QUALITY_SMS015-16 | GRAIN_QUALITY | 237 |
| GRAIN_QUALITY_SMS015-23 | GRAIN_QUALITY | 87 |
| GRAIN_QUALITY_SMS015-9 | GRAIN_QUALITY | 291 |
| GRAIN_QUALITY_SMS015-9 | GRAIN_QUALITY | 273 |
| GRAIN_QUALITY_SMS015-9 | GRAIN_QUALITY | 273 |
| GRAIN_QUALITY_SMS015-9 | GRAIN_QUALITY | 291 |
| GRAIN_QUALITY_SMS015-9 | GRAIN_QUALITY | 273 |
| GRAIN_QUALITY_SMS015-9 | GRAIN_QUALITY | 57 |
| GRAIN_QUALITY_SMS015-9 | GRAIN_QUALITY | 291 |
| GRAIN_QUALITY_SMS015-9 | GRAIN_QUALITY | 273 |
| GRAIN_QUALITY_SMS021-80 | GRAIN_QUALITY | 291 |
| GRAIN_QUALITY_SMS021-80 | GRAIN_QUALITY | 291 |
| GRAIN_QUALITY_SMS021-80 | GRAIN_QUALITY | 291 |
| GRAIN_QUALITY_SMS021-81 | GRAIN_QUALITY | 263 |
| GRAIN_QUALITY_SMS021-81 | GRAIN_QUALITY | 257 |
| GRAIN_QUALITY_SMS021-81 | GRAIN_QUALITY | 263 |
| GRAIN_QUALITY_SMS021-81 | GRAIN_QUALITY | 263 |
| MATURITY_SMS024-20 | MATURITY | 291 |
| MATURITY_SMS024-51 | MATURITY | 291 |
| MATURITY_ZM-DTA-4-1 | MATURITY | 291 |
| MATURITY_ZM-DTA-4-1 | MATURITY | 273 |
| MATURITY_ZM-SILK-4-1 | MATURITY | 291 |
| MATURITY_ZM-SILK-4-1 | MATURITY | 273 |
| PATHOGEN_RESISTANCE_ZM-ADCNLB-3-1 | PATHOGEN RESISTANCE | 87 |
| PATHOGEN_RESISTANCE_ZM-ADCNLB-3-2 | PATHOGEN RESISTANCE | 87 |
| PATHOGEN_RESISTANCE_ZM-ADCNLB-5-1 | PATHOGEN RESISTANCE | 25 |
| PATHOGEN_RESISTANCE_ZM-ADCNLB-5-2 | PATHOGEN RESISTANCE | 25 |
| PATHOGEN_RESISTANCE_ZM-ADCNLB-9-1 | PATHOGEN RESISTANCE | 309 |
| PATHOGEN_RESISTANCE_ZM-ADCNLB-9-1 | PATHOGEN RESISTANCE | 257 |
| PATHOGEN_RESISTANCE_ZM-ADCNLB-9-1 | PATHOGEN RESISTANCE | 319 |
| PATHOGEN_RESISTANCE_ZM-ANMT-1-1 | PATHOGEN RESISTANCE | 257 |
| PATHOGEN_RESISTANCE_ZM-ANMT-1-2 | PATHOGEN RESISTANCE | 257 |
| PATHOGEN_RESISTANCE_ZM-ANMT-10-1 | PATHOGEN RESISTANCE | 87 |
| PATHOGEN_RESISTANCE_ZM-ANMT-10-2 | PATHOGEN RESISTANCE | 87 |
| PATHOGEN_RESISTANCE_ZM-ANMT-2-1 | PATHOGEN RESISTANCE | 87 |
| PATHOGEN_RESISTANCE_ZM-ANMT-5-1 | PATHOGEN RESISTANCE | 263 |
| PATHOGEN_RESISTANCE_ZM-ANMT-5-1 | PATHOGEN RESISTANCE | 263 |
| PATHOGEN_RESISTANCE_ZM-APIT-1-1 | PATHOGEN RESISTANCE | 257 |
| PATHOGEN_RESISTANCE_ZM-APIT-1-2 | PATHOGEN RESISTANCE | 257 |
| PATHOGEN_RESISTANCE_ZM-APIT-10-1 | PATHOGEN RESISTANCE | 87 |
| PATHOGEN_RESISTANCE_ZM-APIT-10-2 | PATHOGEN RESISTANCE | 87 |
| PATHOGEN_RESISTANCE_ZM-APIT-2-1 | PATHOGEN RESISTANCE | 359 |
| PATHOGEN_RESISTANCE_ZM-APIT-2-1 | PATHOGEN RESISTANCE | 33 |
| PATHOGEN_RESISTANCE_ZM-APIT-3-1 | PATHOGEN RESISTANCE | 349 |
| PATHOGEN_RESISTANCE_ZM-APIT-3-1 | PATHOGEN RESISTANCE | 57 |
| PATHOGEN_RESISTANCE_ZM-APIT-3-2 | PATHOGEN RESISTANCE | 257 |
| PATHOGEN_RESISTANCE_ZM-APIT-6-1 | PATHOGEN RESISTANCE | 257 |
| PATHOGEN_RESISTANCE_ZM-APIT-6-1 | PATHOGEN RESISTANCE | 263 |
| PATHOGEN_RESISTANCE_ZM-APIT-6-1 | PATHOGEN RESISTANCE | 349 |
| PATHOGEN_RESISTANCE_ZM-APIT-6-1 | PATHOGEN RESISTANCE | 263 |
| PATHOGEN_RESISTANCE_ZM-APIT-6-1 | PATHOGEN RESISTANCE | 237 |
| PATHOGEN_RESISTANCE_ZM-APIT-9-1 | PATHOGEN RESISTANCE | 87 |
| PATHOGEN_RESISTANCE_ZM-AUT-1-1 | PATHOGEN RESISTANCE | 257 |
| PATHOGEN_RESISTANCE_ZM-AUT-1-2 | PATHOGEN RESISTANCE | 257 |
| PATHOGEN_RESISTANCE_ZM-AUT-10-1 | PATHOGEN RESISTANCE | 87 |
| PATHOGEN_RESISTANCE_ZM-AUT-10-2 | PATHOGEN RESISTANCE | 87 |
| PATHOGEN_RESISTANCE_ZM-AUT-3-1 | PATHOGEN RESISTANCE | 257 |
| PATHOGEN_RESISTANCE_ZM-AUT-6-1 | PATHOGEN RESISTANCE | 257 |
| PATHOGEN_RESISTANCE_ZM-AUT-6-1 | PATHOGEN RESISTANCE | 263 |
| PATHOGEN_RESISTANCE_ZM-AUT-6-1 | PATHOGEN RESISTANCE | 349 |
| PATHOGEN_RESISTANCE_ZM-AUT-6-1 | PATHOGEN RESISTANCE | 263 |
| PATHOGEN_RESISTANCE_ZM-AUT-6-1 | PATHOGEN RESISTANCE | 237 |
| PATHOGEN_RESISTANCE_ZM-CELW-5-1 | PATHOGEN RESISTANCE | 291 |
| PATHOGEN_RESISTANCE_ZM-CELW-6-1 | PATHOGEN RESISTANCE | 87 |
| PATHOGEN_RESISTANCE_ZM-CELW-6-1 | PATHOGEN RESISTANCE | 349 |
| PATHOGEN_RESISTANCE_ZM-CELW-6-1 | PATHOGEN RESISTANCE | 319 |
| PATHOGEN_RESISTANCE_ZM-CRR-1-10 | PATHOGEN RESISTANCE | 87 |
| PATHOGEN_RESISTANCE_ZM-CRR-1-11 | PATHOGEN RESISTANCE | 257 |
| PATHOGEN_RESISTANCE_ZM-CRR-1-12 | PATHOGEN RESISTANCE | 87 |
| PATHOGEN_RESISTANCE_ZM-CRR-1-13 | PATHOGEN RESISTANCE | 257 |
| PATHOGEN_RESISTANCE_ZM-CRR-1-14 | PATHOGEN RESISTANCE | 71 |
| PATHOGEN_RESISTANCE_ZM-CRR-1-14 | PATHOGEN RESISTANCE | 319 |
| PATHOGEN_RESISTANCE_ZM-CRR-1-15 | PATHOGEN RESISTANCE | 257 |
| PATHOGEN_RESISTANCE_ZM-CRR-2-11 | PATHOGEN RESISTANCE | 359 |
| PATHOGEN_RESISTANCE_ZM-CRR-2-11 | PATHOGEN RESISTANCE | 33 |
| PATHOGEN_RESISTANCE_ZM-CRR-3-6 | PATHOGEN RESISTANCE | 349 |
| PATHOGEN_RESISTANCE_ZM-CRR-3-6 | PATHOGEN RESISTANCE | 57 |
| PATHOGEN_RESISTANCE_ZM-CRR-3-7 | PATHOGEN RESISTANCE | 87 |
| PATHOGEN_RESISTANCE_ZM-CRR-3-8 | PATHOGEN RESISTANCE | 87 |
| PATHOGEN_RESISTANCE_ZM-CRR-3-9 | PATHOGEN RESISTANCE | 87 |
| PATHOGEN_RESISTANCE_ZM-CRR-3-9 | PATHOGEN RESISTANCE | 257 |
| PATHOGEN_RESISTANCE_ZM-CRR-4-3 | PATHOGEN RESISTANCE | 59 |
| PATHOGEN_RESISTANCE_ZM-CRR-4-3 | PATHOGEN RESISTANCE | 25 |
| PATHOGEN_RESISTANCE_ZM-CRR-4-4 | PATHOGEN RESISTANCE | 291 |
| PATHOGEN_RESISTANCE_ZM-CRR-4-4 | PATHOGEN RESISTANCE | 71 |
| PATHOGEN_RESISTANCE_ZM-CRR-4-4 | PATHOGEN RESISTANCE | 59 |
| PATHOGEN_RESISTANCE_ZM-CRR-4-4 | PATHOGEN RESISTANCE | 273 |
| PATHOGEN_RESISTANCE_ZM-CRR-4-4 | PATHOGEN RESISTANCE | 273 |
| PATHOGEN_RESISTANCE_ZM-CRR-4-4 | PATHOGEN RESISTANCE | 25 |
| PATHOGEN_RESISTANCE_ZM-CRR-4-4 | PATHOGEN RESISTANCE | 57 |
| PATHOGEN_RESISTANCE_ZM-CRR-4-4 | PATHOGEN RESISTANCE | 33 |
| PATHOGEN_RESISTANCE_ZM-CRR-4-5 | PATHOGEN RESISTANCE | 99 |
| PATHOGEN_RESISTANCE_ZM-CRR-4-5 | PATHOGEN RESISTANCE | 25 |
| PATHOGEN_RESISTANCE_ZM-CRR-4-6 | PATHOGEN RESISTANCE | 291 |
| PATHOGEN_RESISTANCE_ZM-CRR-4-6 | PATHOGEN RESISTANCE | 71 |
| PATHOGEN_RESISTANCE_ZM-CRR-4-6 | PATHOGEN RESISTANCE | 59 |
| PATHOGEN_RESISTANCE_ZM-CRR-4-6 | PATHOGEN RESISTANCE | 273 |
| PATHOGEN_RESISTANCE_ZM-CRR-4-6 | PATHOGEN RESISTANCE | 273 |
| PATHOGEN_RESISTANCE_ZM-CRR-4-6 | PATHOGEN RESISTANCE | 25 |
| PATHOGEN_RESISTANCE_ZM-CRR-4-6 | PATHOGEN RESISTANCE | 57 |
| PATHOGEN_RESISTANCE_ZM-CRR-4-6 | PATHOGEN RESISTANCE | 33 |
| PATHOGEN_RESISTANCE_ZM-CRR-5-6 | PATHOGEN RESISTANCE | 263 |
| PATHOGEN_RESISTANCE_ZM-CRR-5-6 | PATHOGEN RESISTANCE | 263 |
| PATHOGEN_RESISTANCE_ZM-CRR-5-7 | PATHOGEN RESISTANCE | 291 |
| PATHOGEN_RESISTANCE_ZM-CRR-5-7 | PATHOGEN RESISTANCE | 25 |
| PATHOGEN_RESISTANCE_ZM-CRR-5-9 | PATHOGEN RESISTANCE | 291 |
| PATHOGEN_RESISTANCE_ZM-CRR-6-4 | PATHOGEN RESISTANCE | 257 |
| PATHOGEN_RESISTANCE_ZM-CRR-6-4 | PATHOGEN RESISTANCE | 263 |
| PATHOGEN_RESISTANCE_ZM-CRR-6-4 | PATHOGEN RESISTANCE | 263 |
| PATHOGEN_RESISTANCE_ZM-CRR-6-5 | PATHOGEN RESISTANCE | 263 |
| PATHOGEN_RESISTANCE_ZM-CRR-6-5 | PATHOGEN RESISTANCE | 349 |
| PATHOGEN_RESISTANCE_ZM-CRR-6-5 | PATHOGEN RESISTANCE | 263 |
| PATHOGEN_RESISTANCE_ZM-CRR-6-5 | PATHOGEN RESISTANCE | 237 |
| PATHOGEN_RESISTANCE_ZM-CRR-6-6 | PATHOGEN RESISTANCE | 349 |
| PATHOGEN_RESISTANCE_ZM-CRR-7-5 | PATHOGEN RESISTANCE | 87 |
| PATHOGEN_RESISTANCE_ZM-CRR-8-6 | PATHOGEN RESISTANCE | 71 |
| PATHOGEN_RESISTANCE_ZM-CRR-8-6 | PATHOGEN RESISTANCE | 263 |
| PATHOGEN_RESISTANCE_ZM-CRR-8-6 | PATHOGEN RESISTANCE | 349 |
| PATHOGEN_RESISTANCE_ZM-CRR-8-6 | PATHOGEN RESISTANCE | 263 |
| PATHOGEN_RESISTANCE_ZM-CRR-8-7 | PATHOGEN RESISTANCE | 71 |
| PATHOGEN_RESISTANCE_ZM-CRR-8-7 | PATHOGEN RESISTANCE | 263 |
| PATHOGEN_RESISTANCE_ZM-CRR-8-7 | PATHOGEN RESISTANCE | 349 |
| PATHOGEN_RESISTANCE_ZM-CRR-8-7 | PATHOGEN RESISTANCE | 263 |
| PATHOGEN_RESISTANCE_ZM-CRR-9-2 | PATHOGEN RESISTANCE | 309 |
| PATHOGEN_RESISTANCE_ZM-CRR-9-2 | PATHOGEN RESISTANCE | 257 |
| PATHOGEN_RESISTANCE_ZM-CRR-9-2 | PATHOGEN RESISTANCE | 319 |
| PATHOGEN_RESISTANCE_ZM-CRR-9-3 | PATHOGEN RESISTANCE | 309 |
| PATHOGEN_RESISTANCE_ZM-CRR-9-3 | PATHOGEN RESISTANCE | 257 |
| PATHOGEN_RESISTANCE_ZM-CRR-9-3 | PATHOGEN RESISTANCE | 319 |
| PATHOGEN_RESISTANCE_ZM-CRR-9-4 | PATHOGEN RESISTANCE | 87 |
| PATHOGEN_RESISTANCE_ZM-CRR-9-5 | PATHOGEN RESISTANCE | 99 |
| PATHOGEN_RESISTANCE_ZM-CRR-9-5 | PATHOGEN RESISTANCE | 309 |
| PATHOGEN_RESISTANCE_ZM-CRR-9-5 | PATHOGEN RESISTANCE | 257 |
| PATHOGEN_RESISTANCE_ZM-CRR-9-5 | PATHOGEN RESISTANCE | 319 |
| PATHOGEN_RESISTANCE_ZM-CSVEG-1-1 | PATHOGEN RESISTANCE | 87 |
| PATHOGEN_RESISTANCE_ZM-CSVEG-4-1 | PATHOGEN RESISTANCE | 291 |
| PATHOGEN_RESISTANCE_ZM-CSVEG-4-1 | PATHOGEN RESISTANCE | 71 |
| PATHOGEN_RESISTANCE_ZM-CSVEG-4-1 | PATHOGEN RESISTANCE | 59 |
| PATHOGEN_RESISTANCE_ZM-CSVEG-4-1 | PATHOGEN RESISTANCE | 273 |
| PATHOGEN_RESISTANCE_ZM-CSVEG-4-1 | PATHOGEN RESISTANCE | 273 |
| PATHOGEN_RESISTANCE_ZM-CSVEG-4-1 | PATHOGEN RESISTANCE | 25 |
| PATHOGEN_RESISTANCE_ZM-CSVEG-4-1 | PATHOGEN RESISTANCE | 57 |
| PATHOGEN_RESISTANCE_ZM-CSVEG-4-1 | PATHOGEN RESISTANCE | 33 |
| PATHOGEN_RESISTANCE_ZM-CSVEG-4-2 | PATHOGEN RESISTANCE | 99 |
| PATHOGEN_RESISTANCE_ZM-CSVEG-9-1 | PATHOGEN RESISTANCE | 309 |
| PATHOGEN_RESISTANCE_ZM-CSVEG-9-1 | PATHOGEN RESISTANCE | 257 |
| PATHOGEN_RESISTANCE_ZM-CSVEG-9-1 | PATHOGEN RESISTANCE | 319 |
| PATHOGEN_RESISTANCE_ZM-CSVSG-1-1 | PATHOGEN RESISTANCE | 319 |
| PATHOGEN_RESISTANCE_ZM-CSVSG-4-1 | PATHOGEN RESISTANCE | 99 |
| PATHOGEN_RESISTANCE_ZM-DMS-1-1 | PATHOGEN RESISTANCE | 319 |
| PATHOGEN_RESISTANCE_ZM-DMS-1-2 | PATHOGEN RESISTANCE | 257 |
| PATHOGEN_RESISTANCE_ZM-DMS-9-1 | PATHOGEN RESISTANCE | 87 |
| PATHOGEN_RESISTANCE_ZM-ETURI-2-1 | PATHOGEN RESISTANCE | 291 |
| PATHOGEN_RESISTANCE_ZM-ETURI-2-1 | PATHOGEN RESISTANCE | 87 |
| PATHOGEN_RESISTANCE_ZM-ETURI-5-1 | PATHOGEN RESISTANCE | 25 |
| PATHOGEN_RESISTANCE_ZM-HMAYI-3-1 | PATHOGEN RESISTANCE | 349 |
| PATHOGEN_RESISTANCE_ZM-HMAYI-3-1 | PATHOGEN RESISTANCE | 57 |
| PATHOGEN_RESISTANCE_ZM-HPVI-3-1 | PATHOGEN RESISTANCE | 349 |
| PATHOGEN_RESISTANCE_ZM-HPVI-3-1 | PATHOGEN RESISTANCE | 57 |
| PATHOGEN_RESISTANCE_ZM-HPVI-6-1 | PATHOGEN RESISTANCE | 87 |
| PATHOGEN_RESISTANCE_ZM-HPVI-6-1 | PATHOGEN RESISTANCE | 349 |
| PATHOGEN_RESISTANCE_ZM-HPVI-6-1 | PATHOGEN RESISTANCE | 319 |
| PATHOGEN_RESISTANCE_ZM-LT-1-1 | PATHOGEN RESISTANCE | 257 |
| PATHOGEN_RESISTANCE_ZM-LT-1-2 | PATHOGEN RESISTANCE | 87 |
| PATHOGEN_RESISTANCE_ZM-LT-4-1 | PATHOGEN RESISTANCE | 59 |
| PATHOGEN_RESISTANCE_ZM-LT-5-1 | PATHOGEN RESISTANCE | 25 |
| PATHOGEN_RESISTANCE_ZM-LVI-4-1 | PATHOGEN RESISTANCE | 25 |
| PATHOGEN_RESISTANCE_ZM-LVI-5-1 | PATHOGEN RESISTANCE | 25 |
| PATHOGEN_RESISTANCE_ZM-LVI-6-1 | PATHOGEN RESISTANCE | 87 |
| PATHOGEN_RESISTANCE_ZM-LVI-6-1 | PATHOGEN RESISTANCE | 349 |
| PATHOGEN_RESISTANCE_ZM-LVI-6-1 | PATHOGEN RESISTANCE | 319 |
| PATHOGEN_RESISTANCE_ZM-MSVI-1-1 | PATHOGEN RESISTANCE | 257 |
| PATHOGEN_RESISTANCE_ZM-MSVI-1-2 | PATHOGEN RESISTANCE | 87 |
| PATHOGEN_RESISTANCE_ZM-MSVI-1-2 | PATHOGEN RESISTANCE | 33 |
| PATHOGEN_RESISTANCE_ZM-MSVI-10-1 | PATHOGEN RESISTANCE | 87 |
| PATHOGEN_RESISTANCE_ZM-MSVI-2-1 | PATHOGEN RESISTANCE | 87 |
| PATHOGEN_RESISTANCE_ZM-MSVI-3-1 | PATHOGEN RESISTANCE | 257 |
| PATHOGEN_RESISTANCE_ZM-MSVI-3-2 | PATHOGEN RESISTANCE | 349 |
| PATHOGEN_RESISTANCE_ZM-MSVI-3-2 | PATHOGEN RESISTANCE | 57 |
| PATHOGEN_RESISTANCE_ZM-MSVI-9-1 | PATHOGEN RESISTANCE | 87 |
| PATHOGEN_RESISTANCE_ZM-NLBDS-1-1 | PATHOGEN RESISTANCE | 257 |
| PATHOGEN_RESISTANCE_ZM-NLBDS-3-2 | PATHOGEN RESISTANCE | 87 |
| PATHOGEN_RESISTANCE_ZM-NLBDS-3-5 | PATHOGEN RESISTANCE | 87 |
| PATHOGEN_RESISTANCE_ZM-NLBDS-4-1 | PATHOGEN RESISTANCE | 59 |
| PATHOGEN_RESISTANCE_ZM-NLBDS-4-2 | PATHOGEN RESISTANCE | 291 |
| PATHOGEN_RESISTANCE_ZM-NLBDS-4-2 | PATHOGEN RESISTANCE | 71 |
| PATHOGEN_RESISTANCE_ZM-NLBDS-4-2 | PATHOGEN RESISTANCE | 59 |
| PATHOGEN_RESISTANCE_ZM-NLBDS-4-2 | PATHOGEN RESISTANCE | 273 |
| PATHOGEN_RESISTANCE_ZM-NLBDS-4-2 | PATHOGEN RESISTANCE | 273 |
| PATHOGEN_RESISTANCE_ZM-NLBDS-4-2 | PATHOGEN RESISTANCE | 25 |
| PATHOGEN_RESISTANCE_ZM-NLBDS-4-2 | PATHOGEN RESISTANCE | 57 |
| PATHOGEN_RESISTANCE_ZM-NLBDS-4-2 | PATHOGEN RESISTANCE | 33 |
| PATHOGEN_RESISTANCE_ZM-NLBDS-5-1 | PATHOGEN RESISTANCE | 25 |
| PATHOGEN_RESISTANCE_ZM-NLBDS-5-2 | PATHOGEN RESISTANCE | 25 |
| PATHOGEN_RESISTANCE_ZM-NLBDS-5-5 | PATHOGEN RESISTANCE | 291 |
| PATHOGEN_RESISTANCE_ZM-NLBDS-6-1 | PATHOGEN RESISTANCE | 257 |
| PATHOGEN_RESISTANCE_ZM-NLBDS-6-1 | PATHOGEN RESISTANCE | 263 |
| PATHOGEN_RESISTANCE_ZM-NLBDS-6-1 | PATHOGEN RESISTANCE | 349 |
| PATHOGEN_RESISTANCE_ZM-NLBDS-6-1 | PATHOGEN RESISTANCE | 263 |
| PATHOGEN_RESISTANCE_ZM-NLBDS-6-1 | PATHOGEN RESISTANCE | 237 |
| PATHOGEN_RESISTANCE_ZM-NLBDS-8-1 | PATHOGEN RESISTANCE | 263 |
| PATHOGEN_RESISTANCE_ZM-NLBDS-8-1 | PATHOGEN RESISTANCE | 263 |
| PATHOGEN_RESISTANCE_ZM-NLBDS-8-2 | PATHOGEN RESISTANCE | 71 |
| PATHOGEN_RESISTANCE_ZM-NLBDS-8-2 | PATHOGEN RESISTANCE | 349 |
| PATHOGEN_RESISTANCE_ZM-NLBDS-9-1 | PATHOGEN RESISTANCE | 309 |
| PATHOGEN_RESISTANCE_ZM-NLBDS-9-1 | PATHOGEN RESISTANCE | 257 |
| PATHOGEN_RESISTANCE_ZM-NLBDS-9-1 | PATHOGEN RESISTANCE | 319 |
| PATHOGEN_RESISTANCE_ZM-NLBDS-9-2 | PATHOGEN RESISTANCE | 87 |
| PATHOGEN_RESISTANCE_ZM-NLBDS-9-2 | PATHOGEN RESISTANCE | 57 |
| PATHOGEN_RESISTANCE_ZM-NLBDS-9-2 | PATHOGEN RESISTANCE | 319 |
| PATHOGEN_RESISTANCE_ZM-NLBIP-3-1 | PATHOGEN RESISTANCE | 87 |
| PATHOGEN_RESISTANCE_ZM-NLBIP-4-1 | PATHOGEN RESISTANCE | 291 |
| PATHOGEN_RESISTANCE_ZM-NLBIP-4-1 | PATHOGEN RESISTANCE | 71 |
| PATHOGEN_RESISTANCE_ZM-NLBIP-4-1 | PATHOGEN RESISTANCE | 273 |
| PATHOGEN_RESISTANCE_ZM-NLBIP-4-1 | PATHOGEN RESISTANCE | 273 |
| PATHOGEN_RESISTANCE_ZM-NLBIP-4-1 | PATHOGEN RESISTANCE | 25 |
| PATHOGEN_RESISTANCE_ZM-NLBIP-4-1 | PATHOGEN RESISTANCE | 57 |
| PATHOGEN_RESISTANCE_ZM-NLBIP-4-1 | PATHOGEN RESISTANCE | 33 |
| PATHOGEN_RESISTANCE_ZM-NLBIP-5-1 | PATHOGEN RESISTANCE | 25 |
| PATHOGEN_RESISTANCE_ZM-NLBIP-8-1 | PATHOGEN RESISTANCE | 263 |
| PATHOGEN_RESISTANCE_ZM-NLBIP-8-1 | PATHOGEN RESISTANCE | 263 |
| PATHOGEN_RESISTANCE_ZM-NLBIP-9-1 | PATHOGEN RESISTANCE | 309 |
| PATHOGEN_RESISTANCE_ZM-NLBIP-9-1 | PATHOGEN RESISTANCE | 257 |
| PATHOGEN_RESISTANCE_ZM-NLBIP-9-1 | PATHOGEN RESISTANCE | 319 |
| PATHOGEN_RESISTANCE_ZM-PCSI-1-1 | PATHOGEN RESISTANCE | 71 |
| PATHOGEN_RESISTANCE_ZM-PCSI-1-1 | PATHOGEN RESISTANCE | 319 |
| PATHOGEN_RESISTANCE_ZM-PCSI-1-2 | PATHOGEN RESISTANCE | 257 |
| PATHOGEN_RESISTANCE_ZM-PCSI-1-4 | PATHOGEN RESISTANCE | 87 |
| PATHOGEN_RESISTANCE_ZM-PCSI-1-5 | PATHOGEN RESISTANCE | 319 |
| PATHOGEN_RESISTANCE_ZM-PCSI-1-6 | PATHOGEN RESISTANCE | 87 |
| PATHOGEN_RESISTANCE_ZM-PCSI-1-7 | PATHOGEN RESISTANCE | 257 |
| PATHOGEN_RESISTANCE_ZM-PCSI-2-1 | PATHOGEN RESISTANCE | 291 |
| PATHOGEN_RESISTANCE_ZM-PCSI-2-1 | PATHOGEN RESISTANCE | 87 |
| PATHOGEN_RESISTANCE_ZM-PCSI-2-4 | PATHOGEN RESISTANCE | 233 |
| PATHOGEN_RESISTANCE_ZM-PCSI-2-4 | PATHOGEN RESISTANCE | 359 |
| PATHOGEN_RESISTANCE_ZM-PCSI-2-4 | PATHOGEN RESISTANCE | 233 |
| PATHOGEN_RESISTANCE_ZM-PCSI-2-4 | PATHOGEN RESISTANCE | 233 |
| PATHOGEN_RESISTANCE_ZM-PCSI-2-4 | PATHOGEN RESISTANCE | 33 |
| PATHOGEN_RESISTANCE_ZM-PCSI-2-5 | PATHOGEN RESISTANCE | 291 |
| PATHOGEN_RESISTANCE_ZM-PCSI-2-5 | PATHOGEN RESISTANCE | 87 |
| PATHOGEN_RESISTANCE_ZM-PCSI-3-1 | PATHOGEN RESISTANCE | 349 |
| PATHOGEN_RESISTANCE_ZM-PCSI-3-1 | PATHOGEN RESISTANCE | 57 |
| PATHOGEN_RESISTANCE_ZM-PCSI-3-2 | PATHOGEN RESISTANCE | 87 |
| PATHOGEN_RESISTANCE_ZM-PCSI-3-4 | PATHOGEN RESISTANCE | 87 |
| PATHOGEN_RESISTANCE_ZM-PCSI-3-4 | PATHOGEN RESISTANCE | 257 |
| PATHOGEN_RESISTANCE_ZM-PCSI-3-5 | PATHOGEN RESISTANCE | 87 |
| PATHOGEN_RESISTANCE_ZM-PCSI-3-6 | PATHOGEN RESISTANCE | 349 |
| PATHOGEN_RESISTANCE_ZM-PCSI-3-6 | PATHOGEN RESISTANCE | 57 |
| PATHOGEN_RESISTANCE_ZM-PCSI-4-1 | PATHOGEN RESISTANCE | 59 |
| PATHOGEN_RESISTANCE_ZM-PCSI-4-2 | PATHOGEN RESISTANCE | 291 |
| PATHOGEN_RESISTANCE_ZM-PCSI-4-2 | PATHOGEN RESISTANCE | 71 |
| PATHOGEN_RESISTANCE_ZM-PCSI-4-2 | PATHOGEN RESISTANCE | 59 |
| PATHOGEN_RESISTANCE_ZM-PCSI-4-2 | PATHOGEN RESISTANCE | 273 |
| PATHOGEN_RESISTANCE_ZM-PCSI-4-2 | PATHOGEN RESISTANCE | 273 |
| PATHOGEN_RESISTANCE_ZM-PCSI-4-2 | PATHOGEN RESISTANCE | 25 |
| PATHOGEN_RESISTANCE_ZM-PCSI-4-2 | PATHOGEN RESISTANCE | 57 |
| PATHOGEN_RESISTANCE_ZM-PCSI-4-2 | PATHOGEN RESISTANCE | 33 |
| PATHOGEN_RESISTANCE_ZM-PCSI-4-3 | PATHOGEN RESISTANCE | 99 |
| PATHOGEN_RESISTANCE_ZM-PCSI-4-5 | PATHOGEN RESISTANCE | 99 |
| PATHOGEN_RESISTANCE_ZM-PCSI-4-6 | PATHOGEN RESISTANCE | 25 |
| PATHOGEN_RESISTANCE_ZM-PCSI-5-1 | PATHOGEN RESISTANCE | 263 |
| PATHOGEN_RESISTANCE_ZM-PCSI-5-1 | PATHOGEN RESISTANCE | 263 |
| PATHOGEN_RESISTANCE_ZM-PCSI-5-2 | PATHOGEN RESISTANCE | 263 |
| PATHOGEN_RESISTANCE_ZM-PCSI-5-2 | PATHOGEN RESISTANCE | 263 |
| PATHOGEN_RESISTANCE_ZM-PCSI-5-3 | PATHOGEN RESISTANCE | 263 |
| PATHOGEN_RESISTANCE_ZM-PCSI-5-3 | PATHOGEN RESISTANCE | 263 |
| PATHOGEN_RESISTANCE_ZM-PCSI-5-5 | PATHOGEN RESISTANCE | 263 |
| PATHOGEN_RESISTANCE_ZM-PCSI-5-5 | PATHOGEN RESISTANCE | 263 |
| PATHOGEN_RESISTANCE_ZM-PCSI-5-7 | PATHOGEN RESISTANCE | 25 |
| PATHOGEN_RESISTANCE_ZM-PCSI-6-1 | PATHOGEN ERSISTANCE | 257 |
| PATHOGEN_RESISTANCE_ZM-PCSI-6-1 | PATHOGEN RESISTANCE | 263 |
| PATHOGEN_RESISTANCE_ZM-PCSI-6-1 | PATHOGEN RESISTANCE | 263 |
| PATHOGEN_RESISTANCE_ZM-PCSI-9-1 | PATHOGEN RESISTANCE | 87 |
| PATHOGEN_RESISTANCE_ZM-PCSI-9-2 | PATHOGEN RESISTANCE | 309 |
| PATHOGEN_RESISTANCE_ZM-PCSI-9-2 | PATHOGEN RESISTANCE | 257 |
| PATHOGEN_RESISTANCE_ZM-PCSI-9-2 | PATHOGEN RESISTANCE | 319 |
| PATHOGEN_RESISTANCE_ZM-PCSI-9-3 | PATHOGEN RESISTANCE | 309 |
| PATHOGEN_RESISTANCE_ZM-PCSI-9-3 | PATHOGEN RESISTANCE | 257 |
| PATHOGEN_RESISTANCE_ZM-PCSI-9-3 | PATHOGEN RESISTANCE | 319 |
| PATHOGEN_RESISTANCE_ZM-PHSI-4-1 | PATHOGEN RESISTANCE | 25 |
| PATHOGEN_RESISTANCE_ZM-PHSI-5-1 | PATHOGEN RESISTANCE | 291 |
| PATHOGEN_RESISTANCE_ZM-PHSI-6-1 | PATHOGEN RESISTANCE | 257 |
| PATHOGEN_RESISTANCE_ZM-PHSI-6-1 | PATHOGEN RESISTANCE | 263 |
| PATHOGEN_RESISTANCE_ZM-PHSI-6-1 | PATHOGEN RESISTANCE | 263 |
| PATHOGEN_RESISTANCE_ZM-PHSI-6-2 | PATHOGEN RESISTANCE | 87 |
| PATHOGEN_RESISTANCE_ZM-PHSI-6-2 | PATHOGEN RESISTANCE | 349 |
| PATHOGEN_RESISTANCE_ZM-PHSI-6-2 | PATHOGEN RESISTANCE | 319 |
| PATHOGEN_RESISTANCE_ZM-PHSI-6-3 | PATHOGEN RESISTANCE | 263 |
| PATHOGEN_RESISTANCE_ZM-PHSI-6-3 | PATHOGEN RESISTANCE | 263 |
| PATHOGEN_RESISTANCE_ZM-PHSI-8-1 | PATHOGEN RESISTANCE | 71 |
| PATHOGEN_RESISTANCE_ZM-PHSI-8-1 | PATHOGEN RESISTANCE | 349 |
| PATHOGEN_RESISTANCE_ZM-PHSI-9-1 | PATHOGEN RESISTANCE | 319 |
| PATHOGEN_RESISTANCE_ZM-SCBR-1-1 | PATHOGEN RESISTANCE | 319 |
| PATHOGEN_RESISTANCE_ZM-SCBR-1-2 | PATHOGEN RESISTANCE | 257 |
| PATHOGEN_RESISTANCE_ZM-SCBR-5-1 | PATHOGEN RESISTANCE | 25 |
| PATHOGEN_RESISTANCE_ZM-SCBR-8-1 | PATHOGEN RESISTANCE | 263 |
| PATHOGEN_RESISTANCE_ZM-SCBR-8-1 | PATHOGEN RESISTANCE | 263 |
| PATHOGEN_RESISTANCE_ZM-SCBR-9-1 | PATHOGEN RESISTANCE | 319 |
| PATHOGEN_RESISTANCE_ZM-SWCBR-1-1 | PATHOGEN RESISTANCE | 257 |
| PATHOGEN_RESISTANCE_ZM-SWCBR-1-2 | PATHOGEN RESISTANCE | 71 |
| PATHOGEN_RESISTANCE_ZM-SWCBR-1-2 | PATHOGEN RESISTANCE | 319 |
| PATHOGEN_RESISTANCE_ZM-SWCBR-1-3 | PATHOGEN RESISTANCE | 319 |
| PATHOGEN_RESISTANCE_ZM-SWCBR-1-4 | PATHOGEN RESISTANCE | 257 |
| PATHOGEN_RESISTANCE_ZM-SWCBR-1-5 | PATHOGEN RESISTANCE | 71 |
| PATHOGEN_RESISTANCE_ZM-SWCBR-1-6 | PATHOGEN RESISTANCE | 319 |
| PATHOGEN_RESISTANCE_ZM-SWCBR-3-1 | PATHOGEN RESISTANCE | 257 |
| PATHOGEN_RESISTANCE_ZM-SWCBR-3-2 | PATHOGEN RESISTANCE | 257 |
| PATHOGEN_RESISTANCE_ZM-SWCBR-5-1 | PATHOGEN RESISTANCE | 291 |
| PATHOGEN_RESISTANCE_ZM-SWCBR-5-1 | PATHOGEN RESISTANCE | 25 |
| PATHOGEN_RESISTANCE_ZM-SWCBR-5-2 | PATHOGEN RESISTANCE | 25 |
| PATHOGEN_RESISTANCE_ZM-SWCBR-5-3 | PATHOGEN RESISTANCE | 25 |
| PATHOGEN_RESISTANCE_ZM-SWCBR-6-1 | PATHOGEN RESISTANCE | 87 |
| PATHOGEN_RESISTANCE_ZM-SWCBR-6-1 | PATHOGEN RESISTANCE | 349 |
| PATHOGEN_RESISTANCE_ZM-SWCBR-6-1 | PATHOGEN RESISTANCE | 319 |
| PATHOGEN_RESISTANCE_ZM-SWCBR-6-2 | PATHOGEN RESISTANCE | 263 |
| PATHOGEN_RESISTANCE_ZM-SWCBR-6-2 | PATHOGEN RESISTANCE | 349 |
| PATHOGEN_RESISTANCE_ZM-SWCBR-6-2 | PATHOGEN RESISTANCE | 263 |
| PATHOGEN_RESISTANCE_ZM-SWCBR-6-2 | PATHOGEN RESISTANCE | 237 |
| PATHOGEN_RESISTANCE_ZM-SWCBR-6-3 | PATHOGEN RESISTANCE | 263 |
| PATHOGEN_RESISTANCE_ZM-SWCBR-6-3 | PATHOGEN RESISTANCE | 263 |
| PATHOGEN_RESISTANCE_ZM-SWCBR-8-1 | PATHOGEN RESISTANCE | 71 |
| PATHOGEN_RESISTANCE_ZM-SWCBR-8-1 | PATHOGEN RESISTANCE | 349 |
| PATHOGEN_RESISTANCE_ZM-SWCBR-8-2 | PATHOGEN RESISTANCE | 263 |
| PATHOGEN_RESISTANCE_ZM-SWCBR-8-2 | PATHOGEN RESISTANCE | 263 |
| PATHOGEN_RESISTANCE_ZM-SWCBR-9-1 | PATHOGEN RESISTANCE | 309 |
| PATHOGEN_RESISTANCE_ZM-SWCBR-9-1 | PATHOGEN RESISTANCE | 257 |
| PATHOGEN_RESISTANCE_ZM-SWCBR-9-1 | PATHOGEN RESISTANCE | 319 |
| PATHOGEN_RESISTANCE_ZM-SWCBR-9-2 | PATHOGEN RESISTANCE | 87 |
| PATHOGEN_RESISTANCE_ZM-SWCBR-9-2 | PATHOGEN RESISTANCE | 57 |
| PATHOGEN_RESISTANCE_ZM-SWCBR-9-2 | PATHOGEN RESISTANCE | 319 |
| PATHOGEN_RESISTANCE_ZM-SWCBR-9-3 | PATHOGEN RESISTANCE | 309 |
| PATHOGEN_RESISTANCE_ZM-SWCBR-9-3 | PATHOGEN RESISTANCE | 257 |
| PATHOGEN_RESISTANCE_ZM-SWCBR-9-3 | PATHOGEN RESISTANCE | 319 |
| PATHOGEN_RESISTANCE_ZM-SWCBR-9-4 | PATHOGEN RESISTANCE | 309 |
| PATHOGEN_RESISTANCE_ZM-SWCBR-9-4 | PATHOGEN RESISTANCE | 257 |
| PATHOGEN_RESISTANCE_ZM-SWCBR-9-4 | PATHOGEN RESISTANCE | 319 |
| QUALITY_ZM-CPC-1-2 | GRAIN_QUALITY | 319 |
| QUALITY_ZM-CPC-1-3 | GRAIN_QUALITY | 257 |
| QUALITY_ZM-CPC-1-4 | GRAIN_QUALITY | 87 |
| QUALITY_ZM-CPC-1-4 | GRAIN_QUALITY | 217 |
| QUALITY_ZM-CPC-1-5 | GRAIN_QUALITY | 257 |
| QUALITY_ZM-CPC-1-6 | GRAIN_QUALITY | 87 |
| QUALITY_ZM-CPC-1-6 | GRAIN_QUALITY | 217 |
| QUALITY_ZM-CPC-10-1 | GRAIN_QUALITY | 217 |
| QUALITY_ZM-CPC-3-1 | GRAIN_QUALITY | 57 |
| QUALITY_ZM-CPC-3-2 | GRAIN_QUALITY | 87 |
| QUALITY_ZM-CPC-3-3 | GRAIN_QUALITY | 57 |
| QUALITY_ZM-CPC-6-1 | GRAIN_QUALITY | 131 |
| QUALITY_ZM-CPC-6-1 | GRAIN_QUALITY | 131 |
| QUALITY_ZM-CPC-6-2 | GRAIN_QUALITY | 131 |
| QUALITY_ZM-CPC-6-2 | GRAIN_QUALITY | 87 |
| QUALITY_ZM-CPC-6-2 | GRAIN_QUALITY | 331 |
| QUALITY_ZM-CPC-6-2 | GRAIN_QUALITY | 131 |
| QUALITY_ZM-CPC-6-2 | GRAIN_QUALITY | 319 |
| QUALITY_ZM-CPC-7-1 | GRAIN_QUALITY | 281 |
| QUALITY_ZM-CPC-7-2 | GRAIN_QUALITY | 87 |
| QUALITY_ZM-CPC-7-3 | GRAIN_QUALITY | 281 |
| QUALITY_ZM-IVDOM-1-1 | GRAIN_QUALITY | 319 |
| QUALITY_ZM-IVDOM-1-2 | GRAIN_QUALITY | 257 |
| QUALITY_ZM-IVDOM-1-4 | GRAIN_QUALITY | 257 |
| QUALITY_ZM-IVDOM-10-1 | GRAIN_QUALITY | 217 |
| QUALITY_ZM-IVDOM-10-2 | GRAIN_QUALITY | 217 |
| QUALITY_ZM-IVDOM-3-1 | GRAIN_QUALITY | 57 |
| QUALITY_ZM-IVDOM-3-3 | GRAIN_QUALITY | 57 |
| QUALITY_ZM-IVDOM-5-2 | GRAIN_QUALITY | 291 |
| QUALITY_ZM-IVDOM-5-2 | GRAIN_QUALITY | 291 |
| QUALITY_ZM-IVDOM-5-2 | GRAIN_QUALITY | 291 |
| QUALITY_ZM-IVDOM-9-1 | GRAIN_QUALITY | 131 |
| QUALITY_ZM-IVDOM-9-1 | GRAIN_QUALITY | 131 |
| QUALITY_ZM-IVDOM-9-1 | GRAIN_QUALITY | 257 |
| QUALITY_ZM-IVDOM-9-1 | GRAIN_QUALITY | 319 |
| QUALITY_ZM-IVDOM-9-2 | GRAIN_QUALITY | 131 |
| QUALITY_ZM-IVDOM-9-2 | GRAIN_QUALITY | 131 |
| QUALITY_ZM-IVDOM-9-2 | GRAIN_QUALITY | 257 |
| QUALITY_ZM-IVDOM-9-2 | GRAIN_QUALITY | 319 |
| QUALITY_ZM-PC-1-1 | GRAIN_QUALITY | 257 |
| QUALITY_ZM-PC-5-1 | GRAIN_QUALITY | 25 |
| QUALITY_ZM-PC-5-1 | GRAIN_QUALITY | 25 |
| QUALITY_ZM-PC-8-1 | GRAIN_QUALITY | 131 |
| QUALITY_ZM-PC-8-1 | GRAIN_QUALITY | 263 |
| QUALITY_ZM-PC-8-1 | GRAIN_QUALITY | 131 |
| QUALITY_ZM-PC-8-1 | GRAIN_QUALITY | 257 |
| QUALITY_ZM-PC-8-1 | GRAIN_QUALITY | 263 |
| QUALITY_ZM-PC-8-1 | GRAIN_QUALITY | 321 |
| QUALITY_ZM-PC-8-1 | GRAIN_QUALITY | 263 |
| QUALITY_ZM-PC-8-1 | GRAIN_QUALITY | 237 |
| QUALITY_ZM-PC-9-1 | GRAIN_QUALITY | 87 |
| QUALITY_ZM-PC-9-1 | GRAIN_QUALITY | 331 |
| QUALITY_ZM-PC-9-1 | GRAIN_QUALITY | 57 |
| QUALITY_ZM-PC-9-1 | GRAIN_QUALITY | 217 |
| QUALITY_ZM-PC-9-1 | GRAIN_QUALITY | 319 |
| QUALITY_ZM-STC-10-2 | GRAIN_QUALITY | 217 |
| QUALITY_ZM-STC-2-2 | GRAIN_QUALITY | 359 |
| QUALITY_ZM-STC-2-2 | GRAIN_QUALITY | 217 |
| QUALITY_ZM-STC-2-2 | GRAIN_QUALITY | 33 |
| QUALITY_ZM-STC-5-1 | GRAIN_QUALITY | 25 |
| QUALITY_ZM-STC-5-1 | GRAIN_QUALITY | 25 |
| QUALITY_ZM-STC-6-1 | GRAIN_QUALITY | 131 |
| QUALITY_ZM-STC-6-1 | GRAIN_QUALITY | 263 |
| QUALITY_ZM-STC-6-1 | GRAIN_QUALITY | 131 |
| QUALITY_ZM-STC-6-1 | GRAIN_QUALITY | 263 |
| QUALITY_ZM-STC-6-1 | GRAIN_QUALITY | 263 |
| QUALITY_ZM-STC-6-1 | GRAIN_QUALITY | 237 |
| QUALITY_ZM-STC-7-1 | GRAIN_QUALITY | 39 |
| QUALITY_ZM-STC-7-2 | GRAIN_QUALITY | 281 |
| QUALITY_ZM-STC-8-1 | GRAIN_QUALITY | 131 |
| QUALITY_ZM-STC-8-1 | GRAIN_QUALITY | 263 |
| QUALITY_ZM-STC-8-1 | GRAIN_QUALITY | 131 |
| QUALITY_ZM-STC-8-1 | GRAIN_QUALITY | 257 |
| QUALITY_ZM-STC-8-1 | GRAIN_QUALITY | 263 |
| QUALITY_ZM-STC-8-1 | GRAIN_QUALITY | 321 |
| QUALITY_ZM-STC-8-1 | GRAIN_QUALITY | 263 |
| QUALITY_ZM-STC-8-1 | GRAIN_QUALITY | 237 |
| YIELD_ZM-BIOM-3-1 | YIELD | 257 |
| YIELD_ZM-BIOM-8-1 | YIELD | 263 |
| YIELD_ZM-BIOM-8-1 | YIELD | 263 |
| YIELD_ZM-BIOM-8-1 | YIELD | 263 |
| YIELD_ZM-DMC-1-1 | YIELD | 257 |
| YIELD_ZM-DMC-5-1 | YIELD | 25 |
| YIELD_ZM-DMC-6-1 | YIELD | 319 |
| YIELD_ZM-DMC-6-2 | YIELD | 319 |
| YIELD_ZM-DMY-1-4 | YIELD | 257 |
| YIELD_ZM-DMY-2-3 | YIELD | 359 |
| YIELD_ZM-DMY-2-3 | YIELD | 233 |
| YIELD_ZM-DMY-2-3 | YIELD | 359 |
| YIELD_ZM-DMY-2-3 | YIELD | 233 |
| YIELD_ZM-DMY-2-3 | YIELD | 233 |
| YIELD_ZM-DMY-2-3 | YIELD | 233 |
| YIELD_ZM-DMY-2-3 | YIELD | 33 |
| YIELD_ZM-DMY-2-4 | YIELD | 359 |
| YIELD_ZM-DMY-2-4 | YIELD | 359 |
| YIELD_ZM-DMY-2-4 | YIELD | 33 |
| YIELD_ZM-DMY-3-2 | YIELD | 57 |
| YIELD_ZM-DMY-3-3 | YIELD | 57 |
| YIELD_ZM-DMY-4-2 | YIELD | 25 |
| YIELD_ZM-DMY-4-3 | YIELD | 291 |
| YIELD_ZM-DMY-4-3 | YIELD | 273 |
| YIELD_ZM-DMY-4-3 | YIELD | 71 |
| YIELD_ZM-DMY-4-3 | YIELD | 273 |
| YIELD_ZM-DMY-4-3 | YIELD | 291 |
| YIELD_ZM-DMY-4-3 | YIELD | 273 |
| YIELD_ZM-DMY-4-3 | YIELD | 25 |
| YIELD_ZM-DMY-4-3 | YIELD | 57 |
| YIELD_ZM-DMY-4-3 | YIELD | 33 |
| YIELD_ZM-DMY-4-4 | YIELD | 25 |
| YIELD_ZM-DMY-5-1 | YIELD | 291 |
| YIELD_ZM-DMY-5-1 | YIELD | 291 |
| YIELD_ZM-DMY-8-1 | YIELD | 71 |
| YIELD_ZM-DMY-8-1 | YIELD | 305 |
| YIELD_ZM-DMY-8-1 | YIELD | 263 |
| YIELD_ZM-DMY-8-1 | YIELD | 257 |
| YIELD_ZM-DMY-8-1 | YIELD | 263 |
| YIELD_ZM-DMY-8-1 | YIELD | 321 |
| YIELD_ZM-DMY-8-1 | YIELD | 263 |
| YIELD_ZM-DMY-8-2 | YIELD | 263 |
| YIELD_ZM-DMY-8-2 | YIELD | 263 |
| YIELD_ZM-DMY-8-2 | YIELD | 263 |
| YIELD_ZM-DMY-9-1 | YIELD | 257 |
| YIELD_ZM-DMY-9-1 | YIELD | 319 |
| YIELD_ZM-EWT-4-2 | YIELD | 25 |
| YIELD_ZM-GWM2-3-1 | YIELD | 57 |
| YIELD_ZM-GWM2-3-2 | YIELD | 257 |
| YIELD_ZM-GYHA-1-2 | YIELD | 71 |
| YIELD_ZM-GYHA-1-3 | YIELD | 319 |
| YIELD_ZM-GYHA-1-4 | YIELD | 319 |
| YIELD_ZM-GYHA-5-1 | YIELD | 263 |
| YIELD_ZM-GYHA-5-1 | YIELD | 263 |
| YIELD_ZM-GYHA-5-1 | YIELD | 263 |
| YIELD_ZM-GYHA-6-1 | YIELD | 263 |
| YIELD_ZM-GYHA-6-1 | YIELD | 263 |
| YIELD_ZM-GYHA-6-1 | YIELD | 263 |
| YIELD_ZM-GYLD-6-1 | YIELD | 319 |
| YIELD_ZM-HI-1-1 | YIELD | 71 |
| YIELD_ZM-HI-1-1 | YIELD | 319 |
| YIELD_ZM-HI-3-1 | YIELD | 57 |
| YIELD_ZM-HI-4-1 | YIELD | 305 |
| YIELD_ZM-HI-4-1 | YIELD | 25 |
| YIELD_ZM-HI-4-1 | YIELD | 321 |
| YIELD_ZM-HI-8-1 | YIELD | 263 |
| YIELD_ZM-HI-8-1 | YIELD | 263 |
| YIELD_ZM-HI-8-1 | YIELD | 263 |
| YIELD_ZM-KNE-4-1 | YIELD | 25 |
| YIELD_ZM-KW100-1-2 | YIELD | 319 |
| YIELD_ZM-KW100-9-1 | YIELD | 99 |
| YIELD_ZM-KW100-9-1 | YIELD | 257 |
| YIELD_ZM-KW100-9-1 | YIELD | 319 |
| YIELD_ZM-KW300-1-2 | YIELD | 257 |
| YIELD_ZM-KW300-3-2 | YIELD | 57 |
| YIELD_ZM-KW300-4-2 | YIELD | 25 |
| YIELD_ZM-KW300-6-2 | YIELD | 263 |
| YIELD_ZM-KW300-6-2 | YIELD | 263 |
| YIELD_ZM-KW300-6-2 | YIELD | 263 |
| YIELD_ZM-KW300-8-1 | YIELD | 71 |
| YIELD_ZM-KW300-8-1 | YIELD | 305 |
| YIELD_ZM-KW300-8-1 | YIELD | 321 |
| YIELD_ZM-KW300-9-1 | YIELD | 57 |
| YIELD_ZM-KW300-9-2 | YIELD | 99 |
| YIELD_ZM-KW300-9-2 | YIELD | 57 |
| YIELD_ZM-KWE-4-1 | YIELD | 25 |

[0620] TABLE 5B
References for the listed quantitative
trait loci (QTLs) listed in Table 5A

| QTL | REFERENCE |
|---|---|
| ZM-LABA-1-1 | THEOR APPL GENET (1998) 97: 744-755 |
| ZM-LABA-1-2 | THEOR APPL GENET (1998) 97: 744-755 |
| ZM-LABA-2-4 | THEOR APPL GENET (1998) 97: 744-755 |
| ZM-LABA-2-3 | THEOR APPL GENET (1998) 97: 744-755 |
| ZM-LABA-2-1 | THEOR APPL GENET (1998) 97: 744-755 |
| ZM-LABA-3-1 | THEOR APPL GENET (1998) 97: 744-755 |
| ZM-LABA-4-2 | THEOR APPL GENET (1998) 97: 744-755 |
| ZM-LABA-4-1 | THEOR APPL GENET (1998) 97: 744-755 |
| ZM-LABA-7-1 | THEOR APPL GENET (1998) 97: 744-755 |
| ZM-LABA-7-2 | THEOR APPL GENET (1998) 97: 744-755 |
| ZM-LABA-9-1 | THEOR APPL GENET (1998) 97: 744-755 |
| ZM-LABA-10-2 | THEOR APPL GENET (1998) 97: 744-755 |
| ZM-CELW-5-1 | GENETICS (1998) 149: 1997-2006 |
| ZM-CELW-6-1 | GENETICS (1998) 149: 1997-2006 |
| ZM-CRR-1-10 | PHYTOPATHOLOGY (1998) 88: 1324-1329 |
| ZM-CRR-6-4 | PHYTOPATHOLOGY (1998) 88: 1324-1329 |
| ZM-CRR-9-2 | PHYTOPATHOLOGY (1998) 88: 1324-1329 |
| ZM-CRR-1-12 | PHYTOPATHOLOGY (1998) 88: 1324-1329 |
| ZM-CRR-1-11 | PHYTOPATHOLOGY (1998) 88: 1324-1329 |
| ZM-CRR-4-3 | PHYTOPATHOLOGY (1998) 88: 1324-1329 |
| ZM-CRR-7-5 | PHYTOPATHOLOGY (1998) 88: 1324-1329 |
| ZM-CRR-8-6 | PHYTOPATHOLOGY (1998) 88: 1324-1329 |
| ZM-CRR-9-3 | PHYTOPATHOLOGY (1998) 88: 1324-1329 |
| ZM-CRR-1-13 | PHYTOPATHOLOGY (1998) 88: 1324-1329 |
| ZM-CRR-2-11 | PHYTOPATHOLOGY (1998) 88: 1324-1329 |
| ZM-CRR-3-7 | PHYTOPATHOLOGY (1998) 88: 1324-1329 |
| ZM-CRR-3-6 | PHYTOPATHOLOGY (1998) 88: 1324-1329 |
| ZM-CRR-4-5 | PHYTOPATHOLOGY (1998) 88: 1324-1329 |
| ZM-CRR-4-4 | PHYTOPATHOLOGY (1998) 88: 1324-1329 |
| ZM-CRR-5-6 | PHYTOPATHOLOGY (1998) 88: 1324-1329 |
| ZM-CRR-5-7 | PHYTOPATHOLOGY (1998) 88: 1324-1329 |
| ZM-CRR-6-5 | PHYTOPATHOLOGY (1998) 88: 1324-1329 |
| ZM-CRR-8-7 | PHYTOPATHOLOGY (1998) 88: 1324-1329 |
| ZM-CRR-9-4 | PHYTOPATHOLOGY (1998) 88: 1324-1329 |
| ZM-PCSI-1-1 | THEOR APPL GENET (1998) 97: 1321-1330 |
| ZM-PCSI-2-1 | THEOR APPL GENET (1998) 97: 1321-1330 |
| ZM-PCSI-3-1 | THEOR APPL GENET (1998) 97: 1321-1330 |
| ZM-PCSI-3-2 | THEOR APPL GENET (1998) 97: 1321-1330 |
| ZM-PCSI-4-1 | THEOR APPL GENET (1998) 97: 1321-1330 |
| ZM-PCSI-5-1 | THEOR APPL GENET (1998) 97: 1321-1330 |
| ZM-PCSI-9-2 | THEOR APPL GENET (1998) 97: 1321-1330 |
| ZM-PCSI-9-1 | THEOR APPL GENET (1998) 97: 1321-1330 |
| ZM-PCSI-1-2 | THEOR APPL GENET (1998) 97: 1321-1330 |
| ZM-PCSI-5-2 | THEOR APPL GENET (1998) 97: 1321-1330 |
| ZM-PCSI-6-1 | THEOR APPL GENET (1998) 97: 1321-1330 |
| ZM-PCSI-1-4 | THEOR APPL GENET (1998) 97: 1321-1330 |
| ZM-PCSI-2-4 | THEOR APPL GENET (1998) 97: 1321-1330 |
| ZM-PCSI-3-4 | THEOR APPL GENET (1998) 97: 1321-1330 |
| ZM-PCSI-5-3 | THEOR APPL GENET (1998) 97: 1321-1330 |
| ZM-PCSI-1-5 | THEOR APPL GENET (1998) 97: 1321-1330 |
| ZM-PCSI-1-6 | THEOR APPL GENET (1998) 97: 1321-1330 |
| ZM-PCSI-2-5 | THEOR APPL GENET (1998) 97: 1321-1330 |
| ZM-PCSI-3-5 | THEOR APPL GENET (1998) 97: 1321-1330 |
| ZM-PCSI-4-2 | THEOR APPL GENET (1998) 97: 1321-1330 |
| ZM-PCSI-4-3 | THEOR APPL GENET (1998) 97: 1321-1330 |
| ZM-PCSI-4-5 | THEOR APPL GENET (1998) 97: 1321-1330 |
| ZM-PCSI-5-5 | THEOR APPL GENET (1998) 97: 1321-1330 |
| ZM-PCSI-9-3 | THEOR APPL GENET (1998) 97: 1321-1330 |
| ZM-CSVEG-1-1 | THEOR APPL GENET (1998) 97: 1321-1330 |
| ZM-CSVEG-4-1 | THEOR APPL GENET (1998) 97: 1321-1330 |
| ZM-CSVEG-4-2 | THEOR APPL GENET (1998) 97: 1321-1330 |
| ZM-CSVEG-9-1 | THEOR APPL GENET (1998) 97: 1321-1330 |
| ZM-CSVSG-1-1 | THEOR APPL GENET (1998) 97: 1321-1330 |
| ZM-CSVSG-4-1 | THEOR APPL GENET (1998) 97: 1321-1330 |
| ZM-LT-1-1 | CROP SCI (1998) 38: 1062-1072 |
| ZM-LT-1-2 | CROP SCI (1998) 38: 1062-1072 |
| ZM-LT-4-1 | CROP SCI (1998) 38: 1062-1072 |
| ZM-PC-1-1 | CROP SCI (1998) 38: 1062-1072 |
| ZM-PC-5-1 | CROP SCI (1998) 38: 1062-1072 |
| ZM-PC-8-1 | CROP SCI (1998) 38: 1062-1072 |
| ZM-PC-9-1 | CROP SCI (1998) 38: 1062-1072 |
| ZM-SWCBR-1-4 | CROP SCI (1998) 38: 1062-1072 |
| ZM-SWCBR-1-3 | CROP SCI (1998) 38: 1062-1072 |
| ZM-SWCBR-1-2 | CROP SCI (1998) 38: 1062-1072 |
| ZM-SWCBR-1-5 | CROP SCI (1998) 38: 1062-1072 |
| ZM-SWCBR-5-3 | CROP SCI (1998) 38: 1062-1072 |
| ZM-SWCBR-8-2 | CROP SCI (1998) 38: 1062-1072 |
| ZM-SWCBR-9-2 | CROP SCI (1998) 38: 1062-1072 |
| ZM-SCBR-1-2 | CROP SCI (1998) 38: 1062-1072 |
| ZM-SCBR-1-1 | CROP SCI (1998) 38: 1062-1072 |
| ZM-SCBR-5-1 | CROP SCI (1998) 38: 1062-1072 |
| ZM-SCBR-8-1 | CROP SCI (1998) 38: 1062-1072 |
| ZM-SCBR-9-1 | CROP SCI (1998) 38: 1062-1072 |
| ZM-LT-5-1 | CROP SCI (1998) 38: 1062-1072 |
| ZM-SWCBR-1-6 | CROP SCI (1998) 38: 1062-1072 |
| ZM-SWCBR-6-3 | CROP SCI (1998) 38: 1062-1072 |
| ZM-SWCBR-9-3 | CROP SCI (1998) 38: 1062-1072 |
| ZM-SWCBR-9-4 | CROP SCI (1998) 38: 1062-1072 |
| ZM-ASI-1-1 | PLANT BREEDING (1998) 117: 309-318 |
| ZM-ASI-3-1 | PLANT BREEDING (1998) 117: 309-318 |
| ZM-ASI-5-1 | PLANT BREEDING (1998) 117: 309-318 |
| ZM-ASI-6-1 | PLANT BREEDING (1998) 117: 309-318 |
| ZM-ASI-6-2 | PLANT BREEDING (1998) 117: 309-318 |
| ZM-ASI-7-1 | PLANT BREEDING (1998) 117: 309-318 |
| ZM-ASI-8-1 | PLANT BREEDING (1998) 117: 309-318 |
| ZM-ASI-9-1 | PLANT BREEDING (1998) 117: 309-318 |
| ZM-ASI-10-1 | PLANT BREEDING (1998) 117: 309-318 |
| ZM-SILK-1-2 | PLANT BREEDING (1998) 117: 309-318 |
| ZM-SILK-1-1 | PLANT BREEDING (1998) 117: 309-318 |
| ZM-SILK-2-2 | PLANT BREEDING (1998) 117: 309-318 |
| ZM-SILK-2-1 | PLANT BREEDING (1998) 117: 309-318 |
| ZM-SILK-3-1 | PLANT BREEDING (1998) 117: 309-318 |
| ZM-SILK-4-1 | PLANT BREEDING (1998) 117: 309-318 |
| ZM-SILK-5-1 | PLANT BREEDING (1998) 117: 309-318 |
| ZM-SILK-5-2 | PLANT BREEDING (1998) 117: 309-318 |
| ZM-SILK-6-1 | PLANT BREEDING (1998) 117: 309-318 |
| ZM-SILK-7-1 | PLANT BREEDING (1998) 117: 309-318 |
| ZM-SILK-9-2 | PLANT BREEDING (1998) 117: 309-318 |
| ZM-SILK-9-1 | PLANT BREEDING (1998) 117: 309-318 |
| ZM-SILK-10-1 | PLANT BREEDING (1998) 117: 309-318 |
| ZM-SWCBR-3-1 | PLANT BREEDING (1998) 117: 309-318 |
| ZM-SWCBR-5-1 | PLANT BREEDING (1998) 117: 309-318 |
| ZM-SWCBR-5-2 | PLANT BREEDING (1998) 117: 309-318 |
| ZM-SWCBR-6-1 | PLANT BREEDING (1998) 117: 309-318 |
| ZM-SWCBR-6-2 | PLANT BREEDING (1998) 117: 309-318 |
| ZM-SWCBR-8-1 | PLANT BREEDING (1998) 117: 309-318 |
| ZM-SWCBR-9-1 | PLANT BREEDING (1998) 117: 309-318 |
| ZM-ASI-1-3 | PLANT BREEDING (1998) 117: 193-202 |
| ZM-ASI-2-1 | PLANT BREEDING (1998) 117: 193-202 |
| ZM-ASI-3-2 | PLANT BREEDING (1998) 117: 193-202 |
| ZM-ASI-4-1 | PLANT BREEDING (1998) 117: 193-202 |
| ZM-ASI-5-2 | PLANT BREEDING (1998) 117: 193-202 |
| ZM-ASI-8-2 | PLANT BREEDING (1998) 117: 193-202 |
| ZM-SILK-3-2 | PLANT BREEDING (1998) 117: 193-202 |
| ZM-SILK-3-3 | PLANT BREEDING (1998) 117: 193-202 |
| ZM-SILK-6-2 | PLANT BREEDING (1998) 117: 193-202 |
| ZM-SILK-7-2 | PLANT BREEDING (1998) 117: 193-202 |
| ZM-SILK-8-1 | PLANT BREEDING (1998) 117: 193-202 |
| ZM-SILK-9-3 | PLANT BREEDING (1998) 117: 193-202 |
| ZM-SWCBR-1-1 | PLANT BREEDING (1998) 117: 193-202 |
| ZM-SWCBR-3-2 | PLANT BREEDING (1998) 117: 193-202 |
| ZM-ASI-1-4 | PLANT BREEDING (1998) 117: 193-202 |
| ZM-ASI-1-5 | PLANT BREEDING (1998) 117: 193-202 |
| ZM-ASI-3-4 | PLANT BREEDING (1998) 117: 193-202 |
| ZM-ASI-3-3 | PLANT BREEDING (1998) 117: 193-202 |
| ZM-ASI-5-3 | PLANT BREEDING (1998) 117: 193-202 |
| ZM-ASI-10-2 | PLANT BREEDING (1998) 117: 193-202 |
| ZM-GYLD-6-1 | PLANT BREEDING (1998) 117: 193-202 |
| ZM-SILK-3-5 | PLANT BREEDING (1998) 117: 193-202 |
| ZM-SILK-3-4 | PLANT BREEDING (1998) 117: 193-202 |
| ZM-SILK-9-4 | PLANT BREEDING (1998) 117: 193-202 |
| ZM-CPC-7-1 | CROP SCI (1998) 38: 1278-1289 |
| ZM-DMC-5-1 | CROP SCI (1998) 38: 1278-1289 |
| ZM-DMC-6-2 | CROP SCI (1998) 38: 1278-1289 |
| ZM-DMC-6-1 | CROP SCI (1998) 38: 1278-1289 |
| ZM-DMY-4-2 | CROP SCI (1998) 38: 1278-1289 |
| ZM-DMY-8-1 | CROP SCI (1998) 38: 1278-1289 |
| ZM-DMY-9-1 | CROP SCI (1998) 38: 1278-1289 |
| ZM-IVDOM-3-1 | CROP SCI (1998) 38: 1278-1289 |
| ZM-IVDOM-5-2 | CROP SCI (1998) 38: 1278-1289 |
| ZM-STC-5-1 | CROP SCI (1998) 38: 1278-1289 |
| ZM-STC-7-1 | CROP SCI (1998) 38: 1278-1289 |
| ZM-STC-8-1 | CROP SCI (1998) 38: 1278-1289 |
| ZM-CPC-1-4 | CROP SCI (1998) 38: 1278-1289 |
| ZM-CPC-1-3 | CROP SCI (1998) 38: 1278-1289 |
| ZM-CPC-1-2 | CROP SCI (1998) 38: 1278-1289 |
| ZM-CPC-3-2 | CROP SCI (1998) 38: 1278-1289 |
| ZM-CPC-3-1 | CROP SCI (1998) 38: 1278-1289 |
| ZM-CPC-6-1 | CROP SCI (1998) 38: 1278-1289 |
| ZM-CPC-7-3 | CROP SCI (1998) 38: 1278-1289 |
| ZM-CPC-7-2 | CROP SCI (1998) 38: 1278-1289 |
| ZM-DMC-1-1 | CROP SCI (1998) 38: 1278-1289 |
| ZM-DMY-2-4 | CROP SCI (1998) 38: 1278-1289 |
| ZM-DMY-2-3 | CROP SCI (1998) 38: 1278-1289 |
| ZM-DMY-3-2 | CROP SCI (1998) 38: 1278-1289 |
| ZM-DMY-5-1 | CROP SCI (1998) 38: 1278-1289 |
| ZM-DMY-8-2 | CROP SCI (1998) 38: 1278-1289 |
| ZM-IVDOM-1-2 | CROP SCI (1998) 38: 1278-1289 |
| ZM-IVDOM-1-1 | CROP SCI (1998) 38: 1278-1289 |
| ZM-IVDOM-10-1 | CROP SCI (1998) 38: 1278-1289 |
| ZM-STC-6-1 | CROP SCI (1998) 38: 1278-1289 |
| ZM-CPC-1-5 | CROP SCI (1998) 38: 1278-1289 |
| ZM-CPC-1-6 | CROP SCI (1998) 38: 1278-1289 |
| ZM-CPC-3-3 | CROP SCI (1998) 38: 1278-1289 |
| ZM-CPC-6-2 | CROP SCI (1998) 38: 1278-1289 |
| ZM-CPC-10-1 | CROP SCI (1998) 38: 1278-1289 |
| ZM-DMY-1-4 | CROP SCI (1998) 38: 1278-1289 |
| ZM-DMY-3-3 | CROP SCI (1998) 38: 1278-1289 |
| ZM-DMY-4-4 | CROP SCI (1998) 38: 1278-1289 |
| ZM-DMY-4-3 | CROP SCI (1998) 38: 1278-1289 |
| ZM-IVDOM-1-4 | CROP SCI (1998) 38: 1278-1289 |
| ZM-IVDOM-3-3 | CROP SCI (1998) 38: 1278-1289 |
| ZM-IVDOM-9-2 | CROP SCI (1998) 38: 1278-1289 |
| ZM-IVDOM-9-1 | CROP SCI (1998) 38: 1278-1289 |
| ZM-IVDOM-10-2 | CROP SCI (1998) 38: 1278-1289 |
| ZM-STC-2-2 | CROP SCI (1998) 38: 1278-1289 |
| ZM-STC-7-2 | CROP SCI (1998) 38: 1278-1289 |
| ZM-STC-10-2 | CROP SCI (1998) 38: 1278-1289 |
| ZM-GYHA-1-2 | CROP SCI (1998) 38: 1296-1308 |
| ZM-GYHA-1-4 | CROP SCI (1998) 38: 1296-1308 |
| ZM-GYHA-1-3 | CROP SCI (1998) 38: 1296-1308 |
| ZM-GYHA-5-1 | CROP SCI (1998) 38: 1296-1308 |
| ZM-GYHA-6-1 | CROP SCI (1998) 38: 1296-1308 |
| ZM-KW300-1-2 | CROP SCI (1998) 38: 1296-1308 |
| ZM-KW300-3-2 | CROP SCI (1998) 38: 1296-1308 |
| ZM-KW300-4-2 | CROP SCI (1998) 38: 1296-1308 |
| ZM-KW300-6-2 | CROP SCI (1998) 38: 1296-1308 |
| ZM-KW300-8-1 | CROP SCI (1998) 38: 1296-1308 |
| ZM-KW300-9-1 | CROP SCI (1998) 38: 1296-1308 |
| ZM-KW300-9-2 | CROP SCI (1998) 38: 1296-1308 |
| ZM-DMS-1-2 | THEOR APPL GENET (1999) 99: 519-523 |
| ZM-DMS-1-1 | THEOR APPL GENET (1999) 99: 519-523 |
| ZM-DMS-9-1 | THEOR APPL GENET (1999) 99: 519-523 |
| ZM-ASI-1-6 | THEOR APPL GENET (1999) 99: 289-295 |
| ZM-ASI-2-2 | THEOR APPL GENET (1999) 99: 289-295 |
| ZM-ASI-5-4 | THEOR APPL GENET (1999) 99: 289-295 |
| ZM-ASI-7-2 | THEOR APPL GENET (1999) 99: 289-295 |
| ZM-ASI-7-3 | THEOR APPL GENET (1999) 99: 289-295 |
| ZM-ASI-7-4 | THEOR APPL GENET (1999) 99: 289-295 |
| ZM-ASI-8-3 | THEOR APPL GENET (1999) 99: 289-295 |
| ZM-ASI-8-4 | THEOR APPL GENET (1999) 99: 289-295 |
| ZM-ASI-9-3 | THEOR APPL GENET (1999) 99: 289-295 |
| ZM-ASI-9-2 | THEOR APPL GENET (1999) 99: 289-295 |
| ZM-DTA-1-3 | THEOR APPL GENET (1999) 99: 289-295 |
| ZM-DTA-2-3 | THEOR APPL GENET (1999) 99: 289-295 |
| ZM-DTA-2-2 | THEOR APPL GENET (1999) 99: 289-295 |
| ZM-DTA-7-1 | THEOR APPL GENET (1999) 99: 289-295 |
| ZM-DTA-8-3 | THEOR APPL GENET (1999) 99: 289-295 |
| ZM-DTOL-4-3 | THEOR APPL GENET (1999) 99: 289-295 |
| ZM-SILK-7-3 | THEOR APPL GENET (1999) 99: 289-295 |
| ZM-SILK-9-5 | THEOR APPL GENET (1999) 99: 289-295 |
| ZM-DTOL-4-1 | THEOR APPL GENET (1999) 99: 280-288 |
| ZM-DTOL-9-1 | THEOR APPL GENET (1999) 99: 280-288 |
| ZM-EWT-4-2 | THEOR APPL GENET (1999) 99: 280-288 |
| ZM-KNE-4-1 | THEOR APPL GENET (1999) 99: 280-288 |
| ZM-KWE-4-1 | THEOR APPL GENET (1999) 99: 280-288 |
| ZM-CRR-1-14 | THEOR APPL GENET (1999) 99: 593-598 |
| ZM-CRR-1-15 | THEOR APPL GENET (1999) 99: 593-598 |
| ZM-CRR-3-8 | THEOR APPL GENET (1999) 99: 593-598 |
| ZM-CRR-5-9 | THEOR APPL GENET (1999) 99: 593-598 |
| ZM-CRR-6-6 | THEOR APPL GENET (1999) 99: 593-598 |
| ZM-PCSI-1-7 | THEOR APPL GENET (1999) 99: 593-598 |
| ZM-PCSI-3-6 | THEOR APPL GENET (1999) 99: 593-598 |
| ZM-PCSI-4-6 | THEOR APPL GENET (1999) 99: 593-598 |
| ZM-PCSI-5-7 | THEOR APPL GENET (1999) 99: 593-598 |
| ZM-PHSI-4-1 | THEOR APPL GENET (1999) 99: 593-598 |
| ZM-PHSI-5-1 | THEOR APPL GENET (1999) 99: 593-598 |
| ZM-PHSI-6-2 | THEOR APPL GENET (1999) 99: 593-598 |
| ZM-PHSI-6-3 | THEOR APPL GENET (1999) 99: 593-598 |
| ZM-PHSI-6-1 | THEOR APPL GENET (1999) 99: 593-598 |
| ZM-PHSI-8-1 | THEOR APPL GENET (1999) 99: 593-598 |
| ZM-PHSI-9-1 | THEOR APPL GENET (1999) 99: 593-598 |
| ZM-HPVI-3-1 | CROP SCI (1999) 39: 1171-1177 |
| ZM-HPVI-6-1 | CROP SCI (1999) 39: 1171-1177 |
| ZM-LVI-4-1 | CROP SCI (1999) 39: 1171-1177 |
| ZM-LVI-5-1 | CROP SCI (1999) 39: 1171-1177 |
| ZM-LVI-6-1 | CROP SCI (1999) 39: 1171-1177 |
| ZM-TRANS-1-1 | GENETICS (1999) 153: 993-1007 |
| ZM-TRANS-8-1 | GENETICS (1999) 153: 993-1007 |
| ZM-TRANS-8-2 | GENETICS (1999) 153: 993-1007 |
| ZM-ADCNLB-3-1 | CROP SCI (1999) 39: 514-523 |
| ZM-ADCNLB-3-2 | CROP SCI (1999) 39: 514-523 |
| ZM-ADCNLB-5-2 | CROP SCI (1999) 39: 514-523 |
| ZM-ADCNLB-5-1 | CROP SCI (1999) 39: 514-523 |
| ZM-ADCNLB-9-1 | CROP SCI (1999) 39: 514-523 |
| ZM-DTA-1-1 | CROP SCI (1999) 39: 514-523 |
| ZM-DTA-1-2 | CROP SCI (1999) 39: 514-523 |
| ZM-DTA-2-1 | CROP SCI (1999) 39: 514-523 |
| ZM-DTA-3-2 | CROP SCI (1999) 39: 514-523 |
| ZM-DTA-3-1 | CROP SCI (1999) 39: 514-523 |
| ZM-DTA-4-1 | CROP SCI (1999) 39: 514-523 |
| ZM-DTA-5-1 | CROP SCI (1999) 39: 514-523 |
| ZM-DTA-6-1 | CROP SCI (1999) 39: 514-523 |
| ZM-DTA-8-1 | CROP SCI (1999) 39: 514-523 |
| ZM-DTA-10-1 | CROP SCI (1999) 39: 514-523 |
| ZM-NLBIP-3-1 | CROP SCI (1999) 39: 514-523 |
| ZM-NLBIP-4-1 | CROP SCI (1999) 39: 514-523 |
| ZM-NLBIP-5-1 | CROP SCI (1999) 39: 514-523 |
| ZM-NLBIP-8-1 | CROP SCI (1999) 39: 514-523 |
| ZM-NLBIP-9-1 | CROP SCI (1999) 39: 514-523 |
| ZM-NLBDS-3-2 | THEOR APPL GENET (1999) 98: 1036-1045 |
| ZM-NLBDS-5-2 | THEOR APPL GENET (1999) 98: 1036-1045 |
| ZM-NLBDS-5-1 | THEOR APPL GENET (1999) 98: 1036-1045 |
| ZM-NLBDS-8-1 | THEOR APPL GENET (1999) 98: 1036-1045 |
| ZM-NLBDS-9-1 | THEOR APPL GENET (1999) 98: 1036-1045 |
| ZM-NLBDS-1-1 | THEOR APPL GENET (1999) 99: 649-655 |
| ZM-NLBDS-3-5 | THEOR APPL GENET (1999) 99: 649-655 |
| ZM-NLBDS-4-2 | THEOR APPL GENET (1999) 99: 649-655 |
| ZM-NLBDS-4-1 | THEOR APPL GENET (1999) 99: 649-655 |
| ZM-NLBDS-5-5 | THEOR APPL GENET (1999) 99: 649-655 |
| ZM-NLBDS-6-1 | THEOR APPL GENET (1999) 99: 649-655 |
| ZM-NLBDS-8-2 | THEOR APPL GENET (1999) 99: 649-655 |
| ZM-NLBDS-9-2 | THEOR APPL GENET (1999) 99: 649-655 |
| ZM-AUT-1-1 | THEOR APPL GENET (1999) 99: 524-539 |
| ZM-AUT-10-1 | THEOR APPL GENET (1999) 99: 524-539 |
| ZM-APIT-1-1 | THEOR APPL GENET (1999) 99: 524-539 |
| ZM-APIT-2-1 | THEOR APPL GENET (1999) 99: 524-539 |
| ZM-APIT-3-1 | THEOR APPL GENET (1999) 99: 524-539 |
| ZM-APIT-9-1 | THEOR APPL GENET (1999) 99: 524-539 |
| ZM-APIT-10-1 | THEOR APPL GENET (1999) 99: 524-539 |
| ZM-ANMT-1-1 | THEOR APPL GENET (1999) 99: 524-539 |
| ZM-ANMT-2-1 | THEOR APPL GENET (1999) 99: 524-539 |
| ZM-ANMT-10-1 | THEOR APPL GENET (1999) 99: 524-539 |
| ZM-MSVI-1-1 | THEOR APPL GENET (1999) 99: 524-539 |
| ZM-MSVI-1-2 | THEOR APPL GENET (1999) 99: 524-539 |
| ZM-MSVI-2-1 | THEOR APPL GENET (1999) 99: 524-539 |
| ZM-MSVI-3-2 | THEOR APPL GENET (1999) 99: 524-539 |
| ZM-MSVI-3-1 | THEOR APPL GENET (1999) 99: 524-539 |
| ZM-MSVI-9-1 | THEOR APPL GENET (1999) 99: 524-539 |
| ZM-MSVI-10- | THEOR APPL GENET (1999) 99: 524-539 |
| ZM-AUT-1-2 | THEOR APPL GENET (1999) 99: 540-553 |
| ZM-AUT-3-1 | THEOR APPL GENET (1999) 99: 540-553 |
| ZM-AUT-6-1 | THEOR APPL GENET (1999) 99: 540-553 |
| ZM-AUT-10-2 | THEOR APPL GENET (1999) 99: 540-553 |
| ZM-APIT-1-2 | THEOR APPL GENET (1999) 99: 540-553 |
| ZM-APIT-3-2 | THEOR APPL GENET (1999) 99: 540-553 |
| ZM-APIT-6-1 | THEOR APPL GENET (1999) 99: 540-553 |
| ZM-APIT-10-2 | THEOR APPL GENET (1999) 99: 540-553 |
| ZM-ANMT-1-2 | THEOR APPL GENET (1999) 99: 540-553 |
| ZM-ANMT-5-1 | THEOR APPL GENET (1999) 99: 540-553 |
| ZM-ANMT-10-2 | THEOR APPL GENET (1999) 99: 540-553 |
| ZM-ASI-1-7 | THEOR APPL GENET (1999) 99: 1106-1119 |
| ZM-ASI-2-3 | THEOR APPL GENET (1999) 99: 1106-1119 |
| ZM-ASI-4-2 | THEOR APPL GENET (1999) 99: 1106-1119 |
| ZM-ASI-7-5 | THEOR APPL GENET (1999) 99: 1106-1119 |
| ZM-ASI-9-4 | THEOR APPL GENET (1999) 99: 1106-1119 |
| ZM-ASI-10-3 | THEOR APPL GENET (1999) 99: 1106-1119 |
| ZM-BIOM-3-1 | THEOR APPL GENET (1999) 99: 1106-1119 |
| ZM-BIOM-8-1 | THEOR APPL GENET (1999) 99: 1106-1119 |
| ZM-CRR-3-9 | THEOR APPL GENET (1999) 99: 1106-1119 |
| ZM-CRR-4-6 | THEOR APPL GENET (1999) 99: 1106-1119 |
| ZM-CRR-9-5 | THEOR APPL GENET (1999) 99: 1106-1119 |
| ZM-DTA-1-4 | THEOR APPL GENET (1999) 99: 1106-1119 |
| ZM-DTA-4-2 | THEOR APPL GENET (1999) 99: 1106-1119 |
| ZM-DTA-5-2 | THEOR APPL GENET (1999) 99: 1106-1119 |
| ZM-DTA-7-2 | THEOR APPL GENET (1999) 99: 1106-1119 |
| ZM-DTA-8-4 | THEOR APPL GENET (1999) 99: 1106-1119 |
| ZM-DTA-8-2 | THEOR APPL GENET (1999) 99: 1106-1119 |
| ZM-DTA-9-1 | THEOR APPL GENET (1999) 99: 1106-1119 |
| ZM-DTA-10-2 | THEOR APPL GENET (1999) 99: 1106-1119 |
| ZM-ETURI-2-1 | THEOR APPL GENET (1999) 99: 1106-1119 |
| ZM-ETURI-5-1 | THEOR APPL GENET (1999) 99: 1106-1119 |
| ZM-HMAYI-3-1 | THEOR APPL GENET (1999) 99: 1106-1119 |
| ZM-HI-1-1 | THEOR APPL GENET (1999) 99: 1106-1119 |
| ZM-HI-3-1 | THEOR APPL GENET (1999) 99: 1106-1119 |
| ZM-HI-4-1 | THEOR APPL GENET (1999) 99: 1106-1119 |
| ZM-HI-8-1 | THEOR APPL GENET (1999) 99: 1106-1119 |
| ZM-KW100-1-2 | THEOR APPL GENET (1999) 99: 1106-1119 |
| ZM-KW100-9-1 | THEOR APPL GENET (1999) 99: 1106-1119 |
| ZM-SILK-1-3 | THEOR APPL GENET (1999) 99: 1106-1119 |
| ZM-SILK-5-3 | THEOR APPL GENET (1999) 99: 1106-1119 |
| ZM-SILK-7-4 | THEOR APPL GENET (1999) 99: 1106-1119 |
| ZM-SILK-8-2 | THEOR APPL GENET (1999) 99: 1106-1119 |
| ZM-SILK-9-6 | THEOR APPL GENET (1999) 99: 1106-1119 |
| ZM-SILK-10-2 | THEOR APPL GENET (1999) 99: 1106-1119 |
| ZM-GWM2-3-1 | THEOR APPL GENET (1999) 99: 1106-1119 |
| ZM-GWM2-3-2 | THEOR APPL GENET (1999) 99: 1106-1119 |
| ZM-DA-1-1 | THEOR APPL GENET (2000) 101: 907-917 |
| ZM-DA-1-2 | THEOR APPL GENET (2000) 101: 907-917 |
| ZM-DA-2-1 | THEOR APPL GENET (2000) 101: 907-917 |
| ZM-DA-3-1 | THEOR APPL GENET (2000) 101: 907-917 |
| ZM-DA-3-2 | THEOR APPL GENET (2000) 101: 907-917 |
| ZM-DA-4-1 | THEOR APPL GENET (2000) 101: 907-917 |
| ZM-DA-4-2 | THEOR APPL GENET (2000) 101: 907-917 |
| ZM-DA-5-1 | THEOR APPL GENET (2000) 101: 907-917 |
| ZM-DA-6-1 | THEOR APPL GENET (2000) 101: 907-917 |
| ZM-DA-6-2 | THEOR APPL GENET (2000) 101: 907-917 |
| ZM-DA-8-1 | THEOR APPL GENET (2000) 101: 907-917 |
| ZM-DA-10-1 | THEOR APPL GENET (2000) 101: 907-917 |
| ZM-CPC-1-2 | CROP SCI (2001) 41: 690-697 |
| ZM-CPC-6-1 | CROP SCI (2001) 41: 690-697 |
| ZM-CPC-7-1 | CROP SCI (2001) 41: 690-697 |
| ZM-DMY-8-1 | CROP SCI (2001) 41: 690-697 |
| ZM-DMC-5-1 | CROP SCI (2001) 41: 690-697 |
| ZM-SILK-1-1 | CROP SCI (2001) 41: 690-697 |
| ZM-SILK-5-1 | CROP SCI (2001) 41: 690-697 |
| ZM-SILK-8-1 | CROP SCI (2001) 41: 690-697 |
| ZM-STC-5-1 | CROP SCI (2001) 41: 690-697 |
| ZM-STC-8-1 | CROP SCI (2001) 41: 690-697 |
| ZM-DMC-1-1 | THEOR APPL GENET (2001) 102: 230-243 |
| ZM-DMC-5-1 | THEOR APPL GENET (2001) 102: 230-243 |
| ZM-DMC-6-1 | THEOR APPL GENET (2001) 102: 230-243 |
| ZM-AD-1-1 | CROP SCI (2001) 41: 835-845 |
| ZM-AD-1-2 | CROP SCI (2001) 41: 835-845 |
| ZM-AD-2-1 | CROP SCI (2001) 41: 835-845 |
| ZM-AD-3-1 | CROP SCI (2001) 41: 835-845 |
| ZM-AD-3-2 | CROP SCI (2001) 41: 835-845 |
| ZM-AD-4-1 | CROP SCI (2001) 41: 835-845 |
| ZM-AD-8-1 | CROP SCI (2001) 41: 835-845 |
| ZM-AD-9-1 | CROP SCI (2001) 41: 835-845 |
| ZM-ANT-1-1 | THEOR APPL GENET (2001) 102: 163-176 |
| ZM-ANT-1-2 | THEOR APPL GENET (2001) 102: 163-176 |
| ZM-ANT-1-3 | THEOR APPL GENET (2001) 102: 163-176 |
| ZM-ANT-1-4 | THEOR APPL GENET (2001) 102: 163-176 |
| ZM-ANT-1-5 | THEOR APPL GENET (2001) 102: 163-176 |
| ZM-ANT-2-1 | THEOR APPL GENET (2001) 102: 163-176 |
| ZM-ANT-2-2 | THEOR APPL GENET (2001) 102: 163-176 |
| ZM-ANT-3-1 | THEOR APPL GENET (2001) 102: 163-176 |
| ZM-ANT-4-1 | THEOR APPL GENET (2001) 102: 163-176 |
| ZM-ANT-4-2 | THEOR APPL GENET (2001) 102: 163-176 |
| ZM-ANT-4-3 | THEOR APPL GENET (2001) 102: 163-176 |
| ZM-ANT-4-4 | THEOR APPL GENET (2001) 102: 163-176 |
| ZM-ANT-5-1 | THEOR APPL GENET (2001) 102: 163-176 |
| ZM-ANT-6-1 | THEOR APPL GENET (2001) 102: 163-176 |
| ZM-ANT-6-2 | THEOR APPL GENET (2001) 102: 163-176 |
| ZM-ANT-7-1 | THEOR APPL GENET (2001) 102: 163-176 |
| ZM-ANT-7-2 | THEOR APPL GENET (2001) 102: 163-176 |
| ZM-ANT-8-1 | THEOR APPL GENET (2001) 102: 163-176 |
| ZM-ANT-8-2 | THEOR APPL GENET (2001) 102: 163-176 |
| ZM-ANT-9-1 | THEOR APPL GENET (2001) 102: 163-176 |
| ZM-ANT-9-2 | THEOR APPL GENET (2001) 102: 163-176 |
| ZM-ANT-9-3 | THEOR APPL GENET (2001) 102: 163-176 |
| ZM-SILK-1-1 | THEOR APPL GENET (2001) 102: 163-176 |
| ZM-SILK-1-2 | THEOR APPL GENET (2001) 102: 163-176 |
| ZM-SILK-1-3 | THEOR APPL GENET (2001) 102: 163-176 |
| ZM-SILK-1-4 | THEOR APPL GENET (2001) 102: 163-176 |
| ZM-SILK-1-5 | THEOR APPL GENET (2001) 102: 163-176 |
| ZM-SILK-2-1 | THEOR APPL GENET (2001) 102: 163-176 |
| ZM-SILK-2-2 | THEOR APPL GENET (2001) 102: 163-176 |
| ZM-SILK-2-3 | THEOR APPL GENET (2001) 102: 163-176 |
| ZM-SILK-3-1 | THEOR APPL GENET (2001) 102: 163-176 |
| ZM-SILK-4-1 | THEOR APPL GENET (2001) 102: 163-176 |
| ZM-SILK-4-2 | THEOR APPL GENET (2001) 102: 163-176 |
| ZM-SILK-6-1 | THEOR APPL GENET (2001) 102: 163-176 |
| ZM-SILK-6-2 | THEOR APPL GENET (2001) 102: 163-176 |
| ZM-SILK-6-3 | THEOR APPL GENET (2001) 102: 163-176 |
| ZM-SILK-7-1 | THEOR APPL GENET (2001) 102: 163-176 |
| ZM-SILK-7-2 | THEOR APPL GENET (2001) 102: 163-176 |
| ZM-SILK-7-3 | THEOR APPL GENET (2001) 102: 163-176 |
| ZM-SILK-8-1 | THEOR APPL GENET (2001) 102: 163-176 |
| ZM-SILK-9-1 | THEOR APPL GENET (2001) 102: 163-176 |
| ZM-SILK-9-2 | THEOR APPL GENET (2001) 102: 163-176 |
| ZM-SILK-10-1 | THEOR APPL GENET (2001) 102: 163-176 |
| ZM-ASI-1-1 | THEOR APPL GENET (2001) 102: 163-176 |
| ZM-ASI-1-2 | THEOR APPL GENET (2001) 102: 163-176 |
| ZM-ASI-1-3 | THEOR APPL GENET (2001) 102: 163-176 |
| ZM-ASI-2-1 | THEOR APPL GENET (2001) 102: 163-176 |
| ZM-ASI-2-2 | THEOR APPL GENET (2001) 102: 163-176 |
| ZM-ASI-3-1 | THEOR APPL GENET (2001) 102: 163-176 |
| ZM-ASI-4-1 | THEOR APPL GENET (2001) 102: 163-176 |
| ZM-ASI-5-1 | THEOR APPL GENET (2001) 102: 163-176 |
| ZM-ASI-7-1 | THEOR APPL GENET (2001) 102: 163-176 |
| ZM-ASI-7-2 | THEOR APPL GENET (2001) 102: 163-176 |
| ZM-ASI-8-1 | THEOR APPL GENET (2001) 102: 163-176 |
| ZM-ASI-8-2 | THEOR APPL GENET (2001) 102: 163-176 |
| ZM-ASI-9-1 | THEOR APPL GENET (2001) 102: 163-176 |

[0621] TABLE 6A
Sequences associated with the listed maize quantitative trait loci (QTLs) and showing
at least a 2-fold alteration in expression associated with the listed trait.

| QTL | TRAIT | SEQ ID |
|---|---|---|
| ABIOTIC_STRESS_ZM-DTOL-1-1 | ABIOTIC STRESS | 71 |
| ABIOTIC_STRESS_ZM-DTOL-1-1 | ABIOTIC STRESS | 217 |
| ABIOTIC_STRESS_ZM-DTOL-1-1 | ABIOTIC STRESS | 217 |
| ABIOTIC_STRESS_ZM-DTOL-4-1 | ABIOTIC STRESS | 131 |
| ABIOTIC_STRESS_ZM-DTOL-4-1 | ABIOTIC STRESS | 197 |
| ABIOTIC_STRESS_ZM-DTOL-4-1 | ABIOTIC STRESS | 25 |
| ABIOTIC_STRESS_ZM-DTOL-4-1 | ABIOTIC STRESS | 197 |
| ABIOTIC_STRESS_ZM-DTOL-4-1 | ABIOTIC STRESS | 131 |
| ABIOTIC_STRESS_ZM-DTOL-4-1 | ABIOTIC STRESS | 131 |
| ABIOTIC_STRESS_ZM-DTOL-4-1 | ABIOTIC STRESS | 25 |
| ABIOTIC_STRESS_ZM-DTOL-4-3 | ABIOTIC STRESS | 131 |
| ABIOTIC_STRESS_ZM-DTOL-4-3 | ABIOTIC STRESS | 197 |
| ABIOTIC_STRESS_ZM-DTOL-4-3 | ABIOTIC STRESS | 25 |
| ABIOTIC_STRESS_ZM-DTOL-4-3 | ABIOTIC STRESS | 197 |
| ABIOTIC_STRESS_ZM-DTOL-4-3 | ABIOTIC STRESS | 131 |
| ABIOTIC_STRESS_ZM-DTOL-4-3 | ABIOTIC STRESS | 131 |
| ABIOTIC_STRESS_ZM-DTOL-4-3 | ABIOTIC STRESS | 25 |
| ABIOTIC_STRESS_ZM-DTOL-9-1 | ABIOTIC STRESS | 99 |
| ABIOTIC_STRESS_ZM-DTOL-9-1 | ABIOTIC STRESS | 99 |
| ABIOTIC_STRESS_ZM-DTOL-9-1 | ABIOTIC STRESS | 331 |
| ABIOTIC_STRESS_ZM-DTOL-9-1 | ABIOTIC STRESS | 331 |
| ABIOTIC_STRESS_ZM-LABA-1-1 | ABIOTIC STRESS | 319 |
| ABIOTIC_STRESS_ZM-LABA-1-1 | ABIOTIC STRESS | 319 |
| ABIOTIC_STRESS_ZM-LABA-1-1 | ABIOTIC STRESS | 319 |
| ABIOTIC_STRESS_ZM-LABA-1-2 | ABIOTIC STRESS | 285 |
| ABIOTIC_STRESS_ZM-LABA-1-2 | ABIOTIC STRESS | 87 |
| ABIOTIC_STRESS_ZM-LABA-1-2 | ABIOTIC STRESS | 285 |
| ABIOTIC_STRESS_ZM-LABA-1-2 | ABIOTIC STRESS | 87 |
| ABIOTIC_STRESS_ZM-LABA-1-2 | ABIOTIC STRESS | 217 |
| ABIOTIC_STRESS_ZM-LABA-1-2 | ABIOTIC STRESS | 285 |
| ABIOTIC_STRESS_ZM-LABA-1-2 | ABIOTIC STRESS | 87 |
| ABIOTIC_STRESS_ZM-LABA-1-2 | ABIOTIC STRESS | 217 |
| ABIOTIC_STRESS_ZM-LABA-10-2 | ABIOTIC STRESS | 87 |
| ABIOTIC_STRESS_ZM-LABA-10-2 | ABIOTIC STRESS | 87 |
| ABIOTIC_STRESS_ZM-LABA-10-2 | ABIOTIC STRESS | 217 |
| ABIOTIC_STRESS_ZM-LABA-10-2 | ABIOTIC STRESS | 87 |
| ABIOTIC_STRESS_ZM-LABA-10-2 | ABIOTIC STRESS | 217 |
| ABIOTIC_STRESS_ZM-LABA-2-1 | ABIOTIC STRESS | 291 |
| ABIOTIC_STRESS_ZM-LABA-2-1 | ABIOTIC STRESS | 87 |
| ABIOTIC_STRESS_ZM-LABA-2-1 | ABIOTIC STRESS | 291 |
| ABIOTIC_STRESS_ZM-LABA-2-1 | ABIOTIC STRESS | 87 |
| ABIOTIC_STRESS_ZM-LABA-2-1 | ABIOTIC STRESS | 87 |
| ABIOTIC_STRESS_ZM-LABA-2-3 | ABIOTIC STRESS | 233 |
| ABIOTIC_STRESS_ZM-LABA-2-3 | ABIOTIC STRESS | 285 |
| ABIOTIC_STRESS_ZM-LABA-2-3 | ABIOTIC STRESS | 233 |
| ABIOTIC_STRESS_ZM-LABA-2-3 | ABIOTIC STRESS | 33 |
| ABIOTIC_STRESS_ZM-LABA-2-3 | ABIOTIC STRESS | 233 |
| ABIOTIC_STRESS_ZM-LABA-2-3 | ABIOTIC STRESS | 359 |
| ABIOTIC_STRESS_ZM-LABA-2-3 | ABIOTIC STRESS | 233 |
| ABIOTIC_STRESS_ZM-LABA-2-3 | ABIOTIC STRESS | 359 |
| ABIOTIC_STRESS_ZM-LABA-2-3 | ABIOTIC STRESS | 285 |
| ABIOTIC_STRESS_ZM-LABA-2-3 | ABIOTIC STRESS | 281 |
| ABIOTIC_STRESS_ZM-LABA-2-3 | ABIOTIC STRESS | 281 |
| ABIOTIC_STRESS_ZM-LABA-2-3 | ABIOTIC STRESS | 33 |
| ABIOTIC_STRESS_ZM-LABA-2-3 | ABIOTIC STRESS | 359 |
| ABIOTIC_STRESS_ZM-LABA-2-3 | ABIOTIC STRESS | 285 |
| ABIOTIC_STRESS_ZM-LABA-2-3 | ABIOTIC STRESS | 233 |
| ABIOTIC_STRESS_ZM-LABA-2-3 | ABIOTIC STRESS | 33 |
| ABIOTIC_STRESS_ZM-LABA-2-4 | ABIOTIC STRESS | 33 |
| ABIOTIC_STRESS_ZM-LABA-2-4 | ABIOTIC STRESS | 359 |
| ABIOTIC_STRESS_ZM-LABA-2-4 | ABIOTIC STRESS | 359 |
| ABIOTIC_STRESS_ZM-LABA-2-4 | ABIOTIC STRESS | 33 |
| ABIOTIC_STRESS_ZM-LABA-2-4 | ABIOTIC STRESS | 217 |
| ABIOTIC_STRESS_ZM-LABA-2-4 | ABIOTIC STRESS | 359 |
| ABIOTIC_STRESS_ZM-LABA-2-4 | ABIOTIC STRESS | 217 |
| ABIOTIC_STRESS_ZM-LABA-2-4 | ABIOTIC STRESS | 33 |
| ABIOTIC_STRESS_ZM-LABA-3-1 | ABIOTIC STRESS | 285 |
| ABIOTIC_STRESS_ZM-LABA-3-1 | ABIOTIC STRESS | 285 |
| ABIOTIC_STRESS_ZM-LABA-3-1 | ABIOTIC STRESS | 257 |
| ABIOTIC_STRESS_ZM-LABA-3-1 | ABIOTIC STRESS | 257 |
| ABIOTIC_STRESS_ZM-LABA-3-1 | ABIOTIC STRESS | 285 |
| ABIOTIC_STRESS_ZM-LABA-4-1 | ABIOTIC STRESS | 291 |
| ABIOTIC_STRESS_ZM-LABA-4-1 | ABIOTIC STRESS | 33 |
| ABIOTIC_STRESS_ZM-LABA-4-1 | ABIOTIC STRESS | 273 |
| ABIOTIC_STRESS_ZM-LABA-4-1 | ABIOTIC STRESS | 291 |
| ABIOTIC_STRESS_ZM-LABA-4-1 | ABIOTIC STRESS | 25 |
| ABIOTIC_STRESS_ZM-LABA-4-1 | ABIOTIC STRESS | 273 |
| ABIOTIC_STRESS_ZM-LABA-4-1 | ABIOTIC STRESS | 273 |
| ABIOTIC_STRESS_ZM-LABA-4-1 | ABIOTIC STRESS | 71 |
| ABIOTIC_STRESS_ZM-LABA-4-1 | ABIOTIC STRESS | 57 |
| ABIOTIC_STRESS_ZM-LABA-4-1 | ABIOTIC STRESS | 273 |
| ABIOTIC_STRESS_ZM-LABA-4-1 | ABIOTIC STRESS | 273 |
| ABIOTIC_STRESS_ZM-LABA-4-1 | ABIOTIC STRESS | 33 |
| ABIOTIC_STRESS_ZM-LABA-4-1 | ABIOTIC STRESS | 25 |
| ABIOTIC_STRESS_ZM-LABA-4-1 | ABIOTIC STRESS | 57 |
| ABIOTIC_STRESS_ZM-LABA-4-1 | ABIOTIC STRESS | 273 |
| ABIOTIC_STRESS_ZM-LABA-4-1 | ABIOTIC STRESS | 33 |
| ABIOTIC_STRESS_ZM-LABA-4-2 | ABIOTIC STRESS | 291 |
| ABIOTIC_STRESS_ZM-LABA-4-2 | ABIOTIC STRESS | 33 |
| ABIOTIC_STRESS_ZM-LABA-4-2 | ABIOTIC STRESS | 273 |
| ABIOTIC_STRESS_ZM-LABA-4-2 | ABIOTIC STRESS | 291 |
| ABIOTIC_STRESS_ZM-LABA-4-2 | ABIOTIC STRESS | 25 |
| ABIOTIC_STRESS_ZM-LABA-4-2 | ABIOTIC STRESS | 273 |
| ABIOTIC_STRESS_ZM-LABA-4-2 | ABIOTIC STRESS | 273 |
| ABIOTIC_STRESS_ZM-LABA-4-2 | ABIOTIC STRESS | 71 |
| ABIOTIC_STRESS_ZM-LABA-4-2 | ABIOTIC STRESS | 57 |
| ABIOTIC_STRESS_ZM-LABA-4-2 | ABIOTIC STRESS | 273 |
| ABIOTIC_STRESS_ZM-LABA-4-2 | ABIOTIC STRESS | 273 |
| ABIOTIC_STRESS_ZM-LABA-4-2 | ABIOTIC STRESS | 33 |
| ABIOTIC_STRESS_ZM-LABA-4-2 | ABIOTIC STRESS | 25 |
| ABIOTIC_STRESS_ZM-LABA-4-2 | ABIOTIC STRESS | 57 |
| ABIOTIC_STRESS_ZM-LABA-4-2 | ABIOTIC STRESS | 273 |
| ABIOTIC_STRESS_ZM-LABA-4-2 | ABIOTIC STRESS | 33 |
| ABIOTIC_STRESS_ZM-LABA-7-1 | ABIOTIC STRESS | 87 |
| ABIOTIC_STRESS_ZM-LABA-7-1 | ABIOTIC STRESS | 87 |
| ABIOTIC_STRESS_ZM-LABA-7-1 | ABIOTIC STRESS | 87 |
| ABIOTIC_STRESS_ZM-LABA-7-2 | ABIOTIC STRESS | 87 |
| ABIOTIC_STRESS_ZM-LABA-7-2 | ABIOTIC STRESS | 87 |
| ABIOTIC_STRESS_ZM-LABA-7-2 | ABIOTIC STRESS | 87 |
| ABIOTIC_STRESS_ZM-LABA-9-1 | ABIOTIC STRESS | 131 |
| ABIOTIC_STRESS_ZM-LABA-9-1 | ABIOTIC STRESS | 319 |
| ABIOTIC_STRESS_ZM-LABA-9-1 | ABIOTIC STRESS | 309 |
| ABIOTIC_STRESS_ZM-LABA-9-1 | ABIOTIC STRESS | 197 |
| ABIOTIC_STRESS_ZM-LABA-9-1 | ABIOTIC STRESS | 197 |
| ABIOTIC_STRESS_ZM-LABA-9-1 | ABIOTIC STRESS | 257 |
| ABIOTIC_STRESS_ZM-LABA-9-1 | ABIOTIC STRESS | 319 |
| ABIOTIC_STRESS_ZM-LABA-9-1 | ABIOTIC STRESS | 131 |
| ABIOTIC_STRESS_ZM-LABA-9-1 | ABIOTIC STRESS | 131 |
| ABIOTIC_STRESS_ZM-LABA-9-1 | ABIOTIC STRESS | 257 |
| ABIOTIC_STRESS_ZM-LABA-9-1 | ABIOTIC STRESS | 319 |
| FLOWERING_MAS13-15 | FLOWERING | 131 |
| FLOWERING_MAS13-3 | FLOWERING | 131 |
| FLOWERING_SMS021-12 | FLOWERING | 131 |
| FLOWERING_SMS024-46 | FLOWERING | 131 |
| FLOWERING_SMS024-50 | FLOWERING | 131 |
| GRAIN_PERFORMANCE_MAS12-22 | GRAIN_QUALITY | 25 |
| GRAIN_PERFORMANCE_MAS12-22 | GRAIN_QUALITY | 25 |
| GRAIN_PERFORMANCE_MAS12-23 | GRAIN_QUALITY | 285 |
| GRAIN_PERFORMANCE_MAS12-23 | GRAIN_QUALITY | 131 |
| GRAIN_PERFORMANCE_MAS12-23 | GRAIN_QUALITY | 349 |
| GRAIN_PERFORMANCE_MAS12-23 | GRAIN_QUALITY | 197 |
| GRAIN_PERFORMANCE_MAS12-23 | GRAIN_QUALITY | 263 |
| GRAIN_PERFORMANCE_MAS12-23 | GRAIN_QUALITY | 131 |
| GRAIN_PERFORMANCE_MAS12-23 | GRAIN_QUALITY | 263 |
| GRAIN_PERFORMANCE_MAS12-23 | GRAIN_QUALITY | 349 |
| GRAIN_PERFORMANCE_MAS12-23 | GRAIN_QUALITY | 285 |
| GRAIN_PERFORMANCE_MAS12-23 | GRAIN_QUALITY | 263 |
| GRAIN_PERFORMANCE_MAS12-23 | GRAIN_QUALITY | 237 |
| GRAIN_PERFORMANCE_MAS12-24 | GRAIN_QUALITY | 263 |
| GRAIN_PERFORMANCE_MAS12-24 | GRAIN_QUALITY | 257 |
| GRAIN_PERFORMANCE_MAS12-24 | GRAIN_QUALITY | 263 |
| GRAIN_PERFORMANCE_MAS12-24 | GRAIN_QUALITY | 263 |
| GRAIN_PERFORMANCE_MAS12-29 | GRAIN_QUALITY | 281 |
| GRAIN_PERFORMANCE_MAS12-32 | GRAIN_QUALITY | 285 |
| GRAIN_PERFORMANCE_MAS12-32 | GRAIN_QUALITY | 359 |
| GRAIN_PERFORMANCE_MAS12-32 | GRAIN_QUALITY | 233 |
| GRAIN_PERFORMANCE_MAS12-32 | GRAIN_QUALITY | 359 |
| GRAIN_PERFORMANCE_MAS12-32 | GRAIN_QUALITY | 233 |
| GRAIN_PERFORMANCE_MAS12-32 | GRAIN_QUALITY | 281 |
| GRAIN_PERFORMANCE_MAS12-32 | GRAIN_QUALITY | 233 |
| GRAIN_PERFORMANCE_MAS12-32 | GRAIN_QUALITY | 285 |
| GRAIN_PERFORMANCE_MAS12-32 | GRAIN_QUALITY | 233 |
| GRAIN_PERFORMANCE_MAS12-32 | GRAIN_QUALITY | 33 |
| GRAIN_PERFORMANCE_MAS12-33 | GRAIN_QUALITY | 285 |
| GRAIN_PERFORMANCE_MAS12-33 | GRAIN_QUALITY | 87 |
| GRAIN_PERFORMANCE_MAS12-33 | GRAIN_QUALITY | 87 |
| GRAIN_PERFORMANCE_MAS12-33 | GRAIN_QUALITY | 285 |
| GRAIN_PERFORMANCE_MAS12-34 | GRAIN_QUALITY | 291 |
| GRAIN_PERFORMANCE_MAS12-34 | GRAIN_QUALITY | 273 |
| GRAIN_PERFORMANCE_MAS12-34 | GRAIN_QUALITY | 291 |
| GRAIN_PERFORMANCE_MAS12-34 | GRAIN_QUALITY | 273 |
| GRAIN_PERFORMANCE_MAS12-34 | GRAIN_QUALITY | 291 |
| GRAIN_PERFORMANCE_MAS12-34 | GRAIN_QUALITY | 291 |
| GRAIN_PERFORMANCE_MAS12-34 | GRAIN_QUALITY | 273 |
| GRAIN_PERFORMANCE_MAS12-34 | GRAIN_QUALITY | 57 |
| GRAIN_PERFORMANCE_MAS12-34 | GRAIN_QUALITY | 291 |
| GRAIN_PERFORMANCE_MAS12-34 | GRAIN_QUALITY | 273 |
| GRAIN_PERFORMANCE_MAS12-35 | GRAIN_QUALITY | 25 |
| GRAIN_PERFORMANCE_MAS12-35 | GRAIN_QUALITY | 25 |
| GRAIN_PERFORMANCE_MAS12-35 | GRAIN_QUALITY | 321 |
| GRAIN_PERFORMANCE_MAS12-37 | GRAIN_QUALITY | 25 |
| GRAIN_PERFORMANCE_MAS12-37 | GRAIN_QUALITY | 25 |
| GRAIN_PERFORMANCE_MAS12-38 | GRAIN_QUALITY | 281 |
| GRAIN_PERFORMANCE_MAS12-40 | GRAIN_QUALITY | 87 |
| GRAIN_PERFORMANCE_MAS12-40 | GRAIN_QUALITY | 87 |
| GRAIN_PERFORMANCE_MAS12-40 | GRAIN_QUALITY | 217 |
| GRAIN_PERFORMANCE_MAS12-40 | GRAIN_QUALITY | 33 |
| GRAIN_PERFORMANCE_MAS12-41 | GRAIN_QUALITY | 285 |
| GRAIN_PERFORMANCE_MAS12-41 | GRAIN_QUALITY | 359 |
| GRAIN_PERFORMANCE_MAS12-41 | GRAIN_QUALITY | 233 |
| GRAIN_PERFORMANCE_MAS12-41 | GRAIN_QUALITY | 359 |
| GRAIN_PERFORMANCE_MAS12-41 | GRAIN_QUALITY | 233 |
| GRAIN_PERFORMANCE_MAS12-41 | GRAIN_QUALITY | 281 |
| GRAIN_PERFORMANCE_MAS12-41 | GRAIN_QUALITY | 233 |
| GRAIN_PERFORMANCE_MAS12-41 | GRAIN_QUALITY | 285 |
| GRAIN_PERFORMANCE_MAS12-41 | GRAIN_QUALITY | 233 |
| GRAIN_PERFORMANCE_MAS12-41 | GRAIN_QUALITY | 33 |
| GRAIN_PERFORMANCE_MAS12-42 | GRAIN_QUALITY | 285 |
| GRAIN_PERFORMANCE_MAS12-42 | GRAIN_QUALITY | 349 |
| GRAIN_PERFORMANCE_MAS12-42 | GRAIN_QUALITY | 349 |
| GRAIN_PERFORMANCE_MAS12-42 | GRAIN_QUALITY | 57 |
| GRAIN_PERFORMANCE_MAS12-42 | GRAIN_QUALITY | 285 |
| GRAIN_PERFORMANCE_MAS12-43 | GRAIN_QUALITY | 131 |
| GRAIN_PERFORMANCE_MAS12-43 | GRAIN_QUALITY | 349 |
| GRAIN_PERFORMANCE_MAS12-43 | GRAIN_QUALITY | 197 |
| GRAIN_PERFORMANCE_MAS12-43 | GRAIN_QUALITY | 131 |
| GRAIN_PERFORMANCE_MAS12-43 | GRAIN_QUALITY | 349 |
| GRAIN_PERFORMANCE_MAS12-44 | GRAIN_QUALITY | 71 |
| GRAIN_PERFORMANCE_MAS12-44 | GRAIN_QUALITY | 349 |
| GRAIN_PERFORMANCE_MAS12-44 | GRAIN_QUALITY | 349 |
| GRAIN_PERFORMANCE_MAS12-44 | GRAIN_QUALITY | 321 |
| GRAIN_PERFORMANCE_MAS12-47 | GRAIN_QUALITY | 285 |
| GRAIN_PERFORMANCE_MAS12-47 | GRAIN_QUALITY | 131 |
| GRAIN_PERFORMANCE_MAS12-47 | GRAIN_QUALITY | 349 |
| GRAIN_PERFORMANCE_MAS12-47 | GRAIN_QUALITY | 197 |
| GRAIN_PERFORMANCE_MAS12-47 | GRAIN_QUALITY | 263 |
| GRAIN_PERFORMANCE_MAS12-47 | GRAIN_QUALITY | 131 |
| GRAIN_PERFORMANCE_MAS12-47 | GRAIN_QUALITY | 263 |
| GRAIN_PERFORMANCE_MAS12-47 | GRAIN_QUALITY | 349 |
| GRAIN_PERFORMANCE_MAS12-47 | GRAIN_QUALITY | 285 |
| GRAIN_PERFORMANCE_MAS12-47 | GRAIN_QUALITY | 263 |
| GRAIN_PERFORMANCE_MAS12-47 | GRAIN_QUALITY | 237 |
| GRAIN_PERFORMANCE_MAS12-58 | GRAIN_QUALITY | 291 |
| GRAIN_PERFORMANCE_MAS12-58 | GRAIN_QUALITY | 273 |
| GRAIN_PERFORMANCE_MAS12-58 | GRAIN_QUALITY | 71 |
| GRAIN_PERFORMANCE_MAS12-58 | GRAIN_QUALITY | 291 |
| GRAIN_PERFORMANCE_MAS12-58 | GRAIN_QUALITY | 25 |
| GRAIN_PERFORMANCE_MAS12-58 | GRAIN_QUALITY | 273 |
| GRAIN_PERFORMANCE_MAS12-58 | GRAIN_QUALITY | 291 |
| GRAIN_PERFORMANCE_MAS12-58 | GRAIN_QUALITY | 291 |
| GRAIN_PERFORMANCE_MAS12-58 | GRAIN_QUALITY | 273 |
| GRAIN_PERFORMANCE_MAS12-58 | GRAIN_QUALITY | 25 |
| GRAIN_PERFORMANCE_MAS12-58 | GRAIN_QUALITY | 57 |
| GRAIN_PERFORMANCE_MAS12-58 | GRAIN_QUALITY | 291 |
| GRAIN_PERFORMANCE_MAS12-58 | GRAIN_QUALITY | 273 |
| GRAIN_PERFORMANCE_MAS12-58 | GRAIN_QUALITY | 33 |
| GRAIN_PERFORMANCE_MAS13-41 | GRAIN_QUALITY | 319 |
| GRAIN_PERFORMANCE_MAS13-43 | GRAIN_QUALITY | 131 |
| GRAIN_PERFORMANCE_MAS13-43 | GRAIN_QUALITY | 87 |
| GRAIN_PERFORMANCE_MAS13-43 | GRAIN_QUALITY | 349 |
| GRAIN_PERFORMANCE_MAS13-43 | GRAIN_QUALITY | 197 |
| GRAIN_PERFORMANCE_MAS13-43 | GRAIN_QUALITY | 331 |
| GRAIN_PERFORMANCE_MAS13-43 | GRAIN_QUALITY | 131 |
| GRAIN_PERFORMANCE_MAS13-43 | GRAIN_QUALITY | 349 |
| GRAIN_PERFORMANCE_MAS13-43 | GRAIN_QUALITY | 331 |
| GRAIN_PERFORMANCE_MAS13-43 | GRAIN_QUALITY | 87 |
| GRAIN_PERFORMANCE_MAS13-43 | GRAIN_QUALITY | 319 |
| GRAIN_PERFORMANCE_MAS13-44 | GRAIN_QUALITY | 319 |
| GRAIN_PERFORMANCE_MAS13-56 | GRAIN_QUALITY | 99 |
| GRAIN_PERFORMANCE_MAS13-56 | GRAIN_QUALITY | 331 |
| GRAIN_PERFORMANCE_MAS13-56 | GRAIN_QUALITY | 331 |
| GRAIN_PERFORMANCE_MAS16-1 | GRAIN_QUALITY | 319 |
| GRAIN_PERFORMANCE_MAS16-10 | GRAIN_QUALITY | 285 |
| GRAIN_PERFORMANCE_MAS16-10 | GRAIN_QUALITY | 87 |
| GRAIN_PERFORMANCE_MAS16-10 | GRAIN_QUALITY | 87 |
| GRAIN_PERFORMANCE_MAS16-10 | GRAIN_QUALITY | 285 |
| GRAIN_PERFORMANCE_MAS16-10 | GRAIN_QUALITY | 217 |
| GRAIN_PERFORMANCE_MAS16-11 | GRAIN_QUALITY | 281 |
| GRAIN_PERFORMANCE_MAS16-12 | GRAIN_QUALITY | 59 |
| GRAIN_PERFORMANCE_MAS16-13 | GRAIN_QUALITY | 285 |
| GRAIN_PERFORMANCE_MAS16-13 | GRAIN_QUALITY | 87 |
| GRAIN_PERFORMANCE_MAS16-13 | GRAIN_QUALITY | 87 |
| GRAIN_PERFORMANCE_MAS16-13 | GRAIN_QUALITY | 285 |
| GRAIN_PERFORMANCE_MAS16-4 | GRAIN_QUALITY | 285 |
| GRAIN_PERFORMANCE_MAS16-4 | GRAIN_QUALITY | 87 |
| GRAIN_PERFORMANCE_MAS16-4 | GRAIN_QUALITY | 87 |
| GRAIN_PERFORMANCE_MAS16-4 | GRAIN_QUALITY | 285 |
| GRAIN_PERFORMANCE_MAS16-6 | GRAIN_QUALITY | 71 |
| GRAIN_PERFORMANCE_MAS16-6 | GRAIN_QUALITY | 349 |
| GRAIN_PERFORMANCE_MAS16-6 | GRAIN_QUALITY | 349 |
| GRAIN_PERFORMANCE_MAS16-6 | GRAIN_QUALITY | 321 |
| GRAIN_PERFORMANCE_MAS16-8 | GRAIN_QUALITY | 281 |
| GRAIN_PERFORMANCE_MAS19-1 | GRAIN_QUALITY | 319 |
| GRAIN_PERFORMANCE_MAS19-10 | GRAIN_QUALITY | 291 |
| GRAIN_PERFORMANCE_MAS19-10 | GRAIN_QUALITY | 291 |
| GRAIN_PERFORMANCE_MAS19-10 | GRAIN_QUALITY | 87 |
| GRAIN_PERFORMANCE_MAS19-10 | GRAIN_QUALITY | 291 |
| GRAIN_PERFORMANCE_MAS19-10 | GRAIN_QUALITY | 291 |
| GRAIN_PERFORMANCE_MAS19-10 | GRAIN_QUALITY | 87 |
| GRAIN_PERFORMANCE_MAS19-10 | GRAIN_QUALITY | 291 |
| GRAIN_PERFORMANCE_MAS19-13 | GRAIN_QUALITY | 281 |
| GRAIN_PERFORMANCE_MAS19-2 | GRAIN_QUALITY | 285 |
| GRAIN_PERFORMANCE_MAS19-2 | GRAIN_QUALITY | 87 |
| GRAIN_PERFORMANCE_MAS19-2 | GRAIN_QUALITY | 87 |
| GRAIN_PERFORMANCE_MAS19-2 | GRAIN_QUALITY | 285 |
| GRAIN_PERFORMANCE_MAS19-2 | GRAIN_QUALITY | 217 |
| GRAIN_PERFORMANCE_MAS19-5 | GRAIN_QUALITY | 87 |
| GRAIN_PERFORMANCE_MAS19-5 | GRAIN_QUALITY | 87 |
| GRAIN_PERFORMANCE_MAS19-6 | GRAIN_QUALITY | 87 |
| GRAIN_PERFORMANCE_MAS19-6 | GRAIN_QUALITY | 87 |
| GRAIN_PERFORMANCE_MAS19-7 | GRAIN_QUALITY | 285 |
| GRAIN_PERFORMANCE_MAS19-7 | GRAIN_QUALITY | 87 |
| GRAIN_PERFORMANCE_MAS19-7 | GRAIN_QUALITY | 331 |
| GRAIN_PERFORMANCE_MAS19-7 | GRAIN_QUALITY | 331 |
| GRAIN_PERFORMANCE_MAS19-7 | GRAIN_QUALITY | 87 |
| GRAIN_PERFORMANCE_MAS19-7 | GRAIN_QUALITY | 57 |
| GRAIN_PERFORMANCE_MAS19-7 | GRAIN_QUALITY | 285 |
| GRAIN_PERFORMANCE_MAS19-7 | GRAIN_QUALITY | 217 |
| GRAIN_PERFORMANCE_MAS19-8 | GRAIN_QUALITY | 285 |
| GRAIN_PERFORMANCE_MAS19-8 | GRAIN_QUALITY | 87 |
| GRAIN_PERFORMANCE_MAS19-8 | GRAIN_QUALITY | 331 |
| GRAIN_PERFORMANCE_MAS19-8 | GRAIN_QUALITY | 331 |
| GRAIN_PERFORMANCE_MAS19-8 | GRAIN_QUALITY | 87 |
| GRAIN_PERFORMANCE_MAS19-8 | GRAIN_QUALITY | 57 |
| GRAIN_PERFORMANCE_MAS19-8 | GRAIN_QUALITY | 285 |
| GRAIN_PERFORMANCE_MAS19-8 | GRAIN_QUALITY | 217 |
| GRAIN_PERFORMANCE_MAS19-9 | GRAIN_QUALITY | 99 |
| GRAIN_PERFORMANCE_MAS19-9 | GRAIN_QUALITY | 331 |
| GRAIN_PERFORMANCE_MAS19-9 | GRAIN_QUALITY | 331 |
| GRAIN_PERFORMANCE_MAS20-1 | GRAIN_QUALITY | 71 |
| GRAIN_PERFORMANCE_MAS20-1 | GRAIN_QUALITY | 349 |
| GRAIN_PERFORMANCE_MAS20-1 | GRAIN_QUALITY | 349 |
| GRAIN_PERFORMANCE_MAS20-1 | GRAIN_QUALITY | 321 |
| GRAIN_PERFORMANCE_MAS20-2 | GRAIN_QUALITY | 285 |
| GRAIN_PERFORMANCE_MAS20-2 | GRAIN_QUALITY | 359 |
| GRAIN_PERFORMANCE_MAS20-2 | GRAIN_QUALITY | 233 |
| GRAIN_PERFORMANCE_MAS20-2 | GRAIN_QUALITY | 359 |
| GRAIN_PERFORMANCE_MAS20-2 | GRAIN_QUALITY | 233 |
| GRAIN_PERFORMANCE_MAS20-2 | GRAIN_QUALITY | 281 |
| GRAIN_PERFORMANCE_MAS20-2 | GRAIN_QUALITY | 233 |
| GRAIN_PERFORMANCE_MAS20-2 | GRAIN_QUALITY | 285 |
| GRAIN_PERFORMANCE_MAS20-2 | GRAIN_QUALITY | 233 |
| GRAIN_PERFORMANCE_MAS20-2 | GRAIN_QUALITY | 33 |
| GRAIN_PERFORMANCE_MAS20-24 | GRAIN_QUALITY | 87 |
| GRAIN_PERFORMANCE_MAS20-24 | GRAIN_QUALITY | 87 |
| GRAIN_PERFORMANCE_MAS20-3 | GRAIN_QUALITY | 285 |
| GRAIN_PERFORMANCE_MAS20-3 | GRAIN_QUALITY | 349 |
| GRAIN_PERFORMANCE_MAS20-3 | GRAIN_QUALITY | 349 |
| GRAIN_PERFORMANCE_MAS20-3 | GRAIN_QUALITY | 57 |
| GRAIN_PERFORMANCE_MAS20-3 | GRAIN_QUALITY | 285 |
| GRAIN_PERFORMANCE_MAS20-4 | GRAIN_QUALITY | 285 |
| GRAIN_PERFORMANCE_MAS20-4 | GRAIN_QUALITY | 349 |
| GRAIN_PERFORMANCE_MAS20-4 | GRAIN_QUALITY | 349 |
| GRAIN_PERFORMANCE_MAS20-4 | GRAIN_QUALITY | 57 |
| GRAIN_PERFORMANCE_MAS20-4 | GRAIN_QUALITY | 285 |
| GRAIN_PERFORMANCE_MAS20-5 | GRAIN_QUALITY | 285 |
| GRAIN_PERFORMANCE_MAS20-5 | GRAIN_QUALITY | 87 |
| GRAIN_PERFORMANCE_MAS20-5 | GRAIN_QUALITY | 87 |
| GRAIN_PERFORMANCE_MAS20-5 | GRAIN_QUALITY | 285 |
| GRAIN_PERFORMANCE_MAS20-5 | GRAIN_QUALITY | 217 |
| GRAIN_PERFORMANCE_MAS20-6 | GRAIN_QUALITY | 285 |
| GRAIN_PERFORMANCE_MAS20-6 | GRAIN_QUALITY | 87 |
| GRAIN_PERFORMANCE_MAS20-6 | GRAIN_QUALITY | 87 |
| GRAIN_PERFORMANCE_MAS20-6 | GRAIN_QUALITY | 285 |
| GRAIN_PERFORMANCE_MAS20-6 | GRAIN_QUALITY | 217 |
| GRAIN_PERFORMANCE_MAS20-7 | GRAIN_QUALITY | 131 |
| GRAIN_PERFORMANCE_MAS20-7 | GRAIN_QUALITY | 87 |
| GRAIN_PERFORMANCE_MAS20-7 | GRAIN_QUALITY | 197 |
| GRAIN_PERFORMANCE_MAS20-7 | GRAIN_QUALITY | 331 |
| GRAIN_PERFORMANCE_MAS20-7 | GRAIN_QUALITY | 131 |
| GRAIN_PERFORMANCE_MAS20-7 | GRAIN_QUALITY | 331 |
| GRAIN_PERFORMANCE_MAS20-7 | GRAIN_QUALITY | 87 |
| GRAIN_PERFORMANCE_MAS20-7 | GRAIN_QUALITY | 237 |
| GRAIN_PERFORMANCE_MAS20-7 | GRAIN_QUALITY | 319 |
| GRAIN_PERFORMANCE_MAS20-8 | GRAIN_QUALITY | 319 |
| GRAIN_PERFORMANCE_MAS20-9 | GRAIN_QUALITY | 71 |
| GRAIN_PERFORMANCE_MAS20-9 | GRAIN_QUALITY | 217 |
| GRAIN_PERFORMANCE_MAS21-1 | GRAIN_QUALITY | 87 |
| GRAIN_PERFORMANCE_MAS21-1 | GRAIN_QUALITY | 87 |
| GRAIN_PERFORMANCE_MAS21-12 | GRAIN_QUALITY | 87 |
| GRAIN_PERFORMANCE_MAS21-12 | GRAIN_QUALITY | 87 |
| GRAIN_PERFORMANCE_MAS21-12 | GRAIN_QUALITY | 217 |
| GRAIN_PERFORMANCE_MAS21-2 | GRAIN_QUALITY | 87 |
| GRAIN_PERFORMANCE_MAS21-2 | GRAIN_QUALITY | 87 |
| GRAIN_PERFORMANCE_MAS21-4 | GRAIN_QUALITY | 87 |
| GRAIN_PERFORMANCE_MAS21-4 | GRAIN_QUALITY | 87 |
| GRAIN_PERFORMANCE_MAS21-4 | GRAIN_QUALITY | 217 |
| GRAIN_PERFORMANCE_MAS21-5 | GRAIN_QUALITY | 281 |
| GRAIN_PERFORMANCE_MAS21-6 | GRAIN_QUALITY | 291 |
| GRAIN_PERFORMANCE_MAS21-6 | GRAIN_QUALITY | 291 |
| GRAIN_PERFORMANCE_MAS21-6 | GRAIN_QUALITY | 291 |
| GRAIN_PERFORMANCE_MAS21-6 | GRAIN_QUALITY | 291 |
| GRAIN_PERFORMANCE_MAS21-6 | GRAIN_QUALITY | 291 |
| GRAIN_PERFORMANCE_MAS21-7 | GRAIN_QUALITY | 291 |
| GRAIN_PERFORMANCE_MAS21-7 | GRAIN_QUALITY | 291 |
| GRAIN_PERFORMANCE_MAS21-7 | GRAIN_QUALITY | 291 |
| GRAIN_PERFORMANCE_MAS21-7 | GRAIN_QUALITY | 291 |
| GRAIN_PERFORMANCE_MAS21-7 | GRAIN_QUALITY | 291 |
| GRAIN_PERFORMANCE_MAS21-9 | GRAIN_QUALITY | 25 |
| GRAIN_PERFORMANCE_MAS21-9 | GRAIN_QUALITY | 25 |
| GRAIN_PERFORMANCE_MAS22-1 | GRAIN_QUALITY | 285 |
| GRAIN_PERFORMANCE_MAS22-1 | GRAIN_QUALITY | 131 |
| GRAIN_PERFORMANCE_MAS22-1 | GRAIN_QUALITY | 349 |
| GRAIN_PERFORMANCE_MAS22-1 | GRAIN_QUALITY | 197 |
| GRAIN_PERFORMANCE_MAS22-1 | GRAIN_QUALITY | 263 |
| GRAIN_PERFORMANCE_MAS22-1 | GRAIN_QUALITY | 131 |
| GRAIN_PERFORMANCE_MAS22-1 | GRAIN_QUALITY | 263 |
| GRAIN_PERFORMANCE_MAS22-1 | GRAIN_QUALITY | 349 |
| GRAIN_PERFORMANCE_MAS22-1 | GRAIN_QUALITY | 285 |
| GRAIN_PERFORMANCE_MAS22-1 | GRAIN_QUALITY | 263 |
| GRAIN_PERFORMANCE_MAS22-1 | GRAIN_QUALITY | 237 |
| GRAIN_PERFORMANCE_MAS22-17 | GRAIN_QUALITY | 285 |
| GRAIN_PERFORMANCE_MAS22-17 | GRAIN_QUALITY | 87 |
| GRAIN_PERFORMANCE_MAS22-17 | GRAIN_QUALITY | 87 |
| GRAIN_PERFORMANCE_MAS22-17 | GRAIN_QUALITY | 285 |
| GRAIN_PERFORMANCE_MAS22-18 | GRAIN_QUALITY | 285 |
| GRAIN_PERFORMANCE_MAS22-18 | GRAIN_QUALITY | 87 |
| GRAIN_PERFORMANCE_MAS22-18 | GRAIN_QUALITY | 87 |
| GRAIN_PERFORMANCE_MAS22-18 | GRAIN_QUALITY | 285 |
| GRAIN_PERFORMANCE_MAS22-19 | GRAIN_QUALITY | 285 |
| GRAIN_PERFORMANCE_MAS22-19 | GRAIN_QUALITY | 87 |
| GRAIN_PERFORMANCE_MAS22-19 | GRAIN_QUALITY | 87 |
| GRAIN_PERFORMANCE_MAS22-19 | GRAIN_QUALITY | 285 |
| GRAIN_PERFORMANCE_MAS22-2 | GRAIN_QUALITY | 291 |
| GRAIN_PERFORMANCE_MAS22-2 | GRAIN_QUALITY | 273 |
| GRAIN_PERFORMANCE_MAS22-2 | GRAIN_QUALITY | 291 |
| GRAIN_PERFORMANCE_MAS22-2 | GRAIN_QUALITY | 273 |
| GRAIN_PERFORMANCE_MAS22-2 | GRAIN_QUALITY | 291 |
| GRAIN_PERFORMANCE_MAS22-2 | GRAIN_QUALITY | 291 |
| GRAIN_PERFORMANCE_MAS22-2 | GRAIN_QUALITY | 273 |
| GRAIN_PERFORMANCE_MAS22-2 | GRAIN_QUALITY | 57 |
| GRAIN_PERFORMANCE_MAS22-2 | GRAIN_QUALITY | 291 |
| GRAIN_PERFORMANCE_MAS22-2 | GRAIN_QUALITY | 273 |
| GRAIN_PERFORMANCE_MAS22-20 | GRAIN_QUALITY | 291 |
| GRAIN_PERFORMANCE_MAS22-20 | GRAIN_QUALITY | 291 |
| GRAIN_PERFORMANCE_MAS22-20 | GRAIN_QUALITY | 291 |
| GRAIN_PERFORMANCE_MAS22-20 | GRAIN_QUALITY | 291 |
| GRAIN_PERFORMANCE_MAS22-20 | GRAIN_QUALITY | 291 |
| GRAIN_PERFORMANCE_MAS22-21 | GRAIN_QUALITY | 291 |
| GRAIN_PERFORMANCE_MAS22-21 | GRAIN_QUALITY | 291 |
| GRAIN_PERFORMANCE_MAS22-21 | GRAIN_QUALITY | 291 |
| GRAIN_PERFORMANCE_MAS22-21 | GRAIN_QUALITY | 291 |
| GRAIN_PERFORMANCE_MAS22-21 | GRAIN_QUALITY | 291 |
| GRAIN_PERFORMANCE_MAS22-3 | GRAIN_QUALITY | 291 |
| GRAIN_PERFORMANCE_MAS22-3 | GRAIN_QUALITY | 273 |
| GRAIN_PERFORMANCE_MAS22-3 | GRAIN_QUALITY | 291 |
| GRAIN_PERFORMANCE_MAS22-3 | GRAIN_QUALITY | 273 |
| GRAIN_PERFORMANCE_MAS22-3 | GRAIN_QUALITY | 291 |
| GRAIN_PERFORMANCE_MAS22-3 | GRAIN_QUALITY | 291 |
| GRAIN_PERFORMANCE_MAS22-3 | GRAIN_QUALITY | 273 |
| GRAIN_PERFORMANCE_MAS22-3 | GRAIN_QUALITY | 57 |
| GRAIN_PERFORMANCE_MAS22-3 | GRAIN_QUALITY | 291 |
| GRAIN_PERFORMANCE_MAS22-3 | GRAIN_QUALITY | 273 |
| GRAIN_PERFORMANCE_MAS22-4 | GRAIN_QUALITY | 291 |
| GRAIN_PERFORMANCE_MAS22-4 | GRAIN_QUALITY | 273 |
| GRAIN_PERFORMANCE_MAS22-4 | GRAIN_QUALITY | 291 |
| GRAIN_PERFORMANCE_MAS22-4 | GRAIN_QUALITY | 273 |
| GRAIN_PERFORMANCE_MAS22-4 | GRAIN_QUALITY | 291 |
| GRAIN_PERFORMANCE_MAS22-4 | GRAIN_QUALITY | 291 |
| GRAIN_PERFORMANCE_MAS22-4 | GRAIN_QUALITY | 273 |
| GRAIN_PERFORMANCE_MAS22-4 | GRAIN_QUALITY | 57 |
| GRAIN_PERFORMANCE_MAS22-4 | GRAIN_QUALITY | 291 |
| GRAIN_PERFORMANCE_MAS22-4 | GRAIN_QUALITY | 273 |
| GRAIN_PERFORMANCE_MAS22-5 | GRAIN_QUALITY | 319 |
| GRAIN_PERFORMANCE_MAS22-6 | GRAIN_QUALITY | 319 |
| GRAIN_PERFORMANCE_MAS22-7 | GRAIN_QUALITY | 71 |
| GRAIN_PERFORMANCE_MAS22-7 | GRAIN_QUALITY | 131 |
| GRAIN_PERFORMANCE_MAS22-7 | GRAIN_QUALITY | 349 |
| GRAIN_PERFORMANCE_MAS22-7 | GRAIN_QUALITY | 197 |
| GRAIN_PERFORMANCE_MAS22-7 | GRAIN_QUALITY | 263 |
| GRAIN_PERFORMANCE_MAS22-7 | GRAIN_QUALITY | 131 |
| GRAIN_PERFORMANCE_MAS22-7 | GRAIN_QUALITY | 257 |
| GRAIN_PERFORMANCE_MAS22-7 | GRAIN_QUALITY | 263 |
| GRAIN_PERFORMANCE_MAS22-7 | GRAIN_QUALITY | 349 |
| GRAIN_PERFORMANCE_MAS22-7 | GRAIN_QUALITY | 321 |
| GRAIN_PERFORMANCE_MAS22-7 | GRAIN_QUALITY | 263 |
| GRAIN_PERFORMANCE_MAS22-7 | GRAIN_QUALITY | 237 |
| GRAIN_PERFORMANCE_MAS22-8 | GRAIN_QUALITY | 71 |
| GRAIN_PERFORMANCE_MAS22-8 | GRAIN_QUALITY | 131 |
| GRAIN_PERFORMANCE_MAS22-8 | GRAIN_QUALITY | 349 |
| GRAIN_PERFORMANCE_MAS22-8 | GRAIN_QUALITY | 197 |
| GRAIN_PERFORMANCE_MAS22-8 | GRAIN_QUALITY | 263 |
| GRAIN_PERFORMANCE_MAS22-8 | GRAIN_QUALITY | 131 |
| GRAIN_PERFORMANCE_MAS22-8 | GRAIN_QUALITY | 257 |
| GRAIN_PERFORMANCE_MAS22-8 | GRAIN_QUALITY | 263 |
| GRAIN_PERFORMANCE_MAS22-8 | GRAIN_QUALITY | 349 |
| GRAIN_PERFORMANCE_MAS22-8 | GRAIN_QUALITY | 321 |
| GRAIN_PERFORMANCE_MAS22-8 | GRAIN_QUALITY | 263 |
| GRAIN_PERFORMANCE_MAS22-8 | GRAIN_QUALITY | 237 |
| GRAIN_PERFORMANCE_MAS22-9 | GRAIN_QUALITY | 131 |
| GRAIN_PERFORMANCE_MAS22-9 | GRAIN_QUALITY | 197 |
| GRAIN_PERFORMANCE_MAS22-9 | GRAIN_QUALITY | 131 |
| GRAIN_PERFORMANCE_MAS22-9 | GRAIN_QUALITY | 237 |
| GRAIN_PERFORMANCE_MAS23-11 | GRAIN_QUALITY | 263 |
| GRAIN_PERFORMANCE_MAS23-11 | GRAIN_QUALITY | 331 |
| GRAIN_PERFORMANCE_MAS23-11 | GRAIN_QUALITY | 263 |
| GRAIN_PERFORMANCE_MAS23-11 | GRAIN_QUALITY | 331 |
| GRAIN_PERFORMANCE_MAS23-11 | GRAIN_QUALITY | 263 |
| GRAIN_PERFORMANCE_MAS23-12 | GRAIN_QUALITY | 319 |
| GRAIN_PERFORMANCE_MAS23-20 | GRAIN_QUALITY | 319 |
| GRAIN_PERFORMANCE_MAS23-21 | GRAIN_QUALITY | 319 |
| GRAIN_PERFORMANCE_MAS23-22 | GRAIN_QUALITY | 319 |
| GRAIN_PERFORMANCE_MAS23-4 | GRAIN_QUALITY | 285 |
| GRAIN_PERFORMANCE_MAS23-4 | GRAIN_QUALITY | 87 |
| GRAIN_PERFORMANCE_MAS23-4 | GRAIN_QUALITY | 331 |
| GRAIN_PERFORMANCE_MAS23-4 | GRAIN_QUALITY | 331 |
| GRAIN_PERFORMANCE_MAS23-4 | GRAIN_QUALITY | 87 |
| GRAIN_PERFORMANCE_MAS23-4 | GRAIN_QUALITY | 57 |
| GRAIN_PERFORMANCE_MAS23-4 | GRAIN_QUALITY | 285 |
| GRAIN_PERFORMANCE_MAS23-4 | GRAIN_QUALITY | 217 |
| GRAIN_PERFORMANCE_MAS23-5 | GRAIN_QUALITY | 291 |
| GRAIN_PERFORMANCE_MAS23-5 | GRAIN_QUALITY | 291 |
| GRAIN_PERFORMANCE_MAS23-5 | GRAIN_QUALITY | 291 |
| GRAIN_PERFORMANCE_MAS23-5 | GRAIN_QUALITY | 291 |
| GRAIN_PERFORMANCE_MAS23-5 | GRAIN_QUALITY | 291 |
| GRAIN_PERFORMANCE_MAS23-6 | GRAIN_QUALITY | 281 |
| GRAIN_PERFORMANCE_MAS23-7 | GRAIN_QUALITY | 285 |
| GRAIN_PERFORMANCE_MAS23-7 | GRAIN_QUALITY | 87 |
| GRAIN_PERFORMANCE_MAS23-7 | GRAIN_QUALITY | 87 |
| GRAIN_PERFORMANCE_MAS23-7 | GRAIN_QUALITY | 285 |
| GRAIN_PERFORMANCE_MAS23-8 | GRAIN_QUALITY | 285 |
| GRAIN_PERFORMANCE_MAS23-8 | GRAIN_QUALITY | 87 |
| GRAIN_PERFORMANCE_MAS23-8 | GRAIN_QUALITY | 87 |
| GRAIN_PERFORMANCE_MAS23-8 | GRAIN_QUALITY | 285 |
| GRAIN_PERFORMANCE_MAS24-23 | GRAIN_QUALITY | 319 |
| GRAIN_PERFORMANCE_MAS24-24 | GRAIN_QUALITY | 319 |
| GRAIN_PERFORMANCE_MAS24-25 | GRAIN_QUALITY | 131 |
| GRAIN_PERFORMANCE_MAS24-25 | GRAIN_QUALITY | 197 |
| GRAIN_PERFORMANCE_MAS24-25 | GRAIN_QUALITY | 263 |
| GRAIN_PERFORMANCE_MAS24-25 | GRAIN_QUALITY | 131 |
| GRAIN_PERFORMANCE_MAS24-25 | GRAIN_QUALITY | 257 |
| GRAIN_PERFORMANCE_MAS24-25 | GRAIN_QUALITY | 263 |
| GRAIN_PERFORMANCE_MAS24-25 | GRAIN_QUALITY | 263 |
| GRAIN_PERFORMANCE_MAS24-25 | GRAIN_QUALITY | 237 |
| GRAIN_PERFORMANCE_MAS24-26 | GRAIN_QUALITY | 87 |
| GRAIN_PERFORMANCE_MAS24-26 | GRAIN_QUALITY | 87 |
| GRAIN_PERFORMANCE_MAS25-1 | GRAIN_QUALITY | 285 |
| GRAIN_PERFORMANCE_MAS25-1 | GRAIN_QUALITY | 263 |
| GRAIN_PERFORMANCE_MAS25-1 | GRAIN_QUALITY | 331 |
| GRAIN_PERFORMANCE_MAS25-1 | GRAIN_QUALITY | 263 |
| GRAIN_PERFORMANCE_MAS25-1 | GRAIN_QUALITY | 331 |
| GRAIN_PERFORMANCE_MAS25-1 | GRAIN_QUALITY | 285 |
| GRAIN_PERFORMANCE_MAS25-1 | GRAIN_QUALITY | 263 |
| GRAIN_PERFORMANCE_MAS25-13 | GRAIN_QUALITY | 349 |
| GRAIN_PERFORMANCE_MAS25-13 | GRAIN_QUALITY | 349 |
| GRAIN_PERFORMANCE_MAS25-13 | GRAIN_QUALITY | 57 |
| GRAIN_PERFORMANCE_MAS25-14 | GRAIN_QUALITY | 349 |
| GRAIN_PERFORMANCE_MAS25-14 | GRAIN_QUALITY | 349 |
| GRAIN_PERFORMANCE_MAS25-14 | GRAIN_QUALITY | 57 |
| GRAIN_PERFORMANCE_MAS25-17 | GRAIN_QUALITY | 87 |
| GRAIN_PERFORMANCE_MAS25-17 | GRAIN_QUALITY | 87 |
| GRAIN_PERFORMANCE_MAS25-19 | GRAIN_QUALITY | 319 |
| GRAIN_PERFORMANCE_MAS25-2 | GRAIN_QUALITY | 291 |
| GRAIN_PERFORMANCE_MAS25-2 | GRAIN_QUALITY | 291 |
| GRAIN_PERFORMANCE_MAS25-2 | GRAIN_QUALITY | 291 |
| GRAIN_PERFORMANCE_MAS25-2 | GRAIN_QUALITY | 291 |
| GRAIN_PERFORMANCE_MAS25-2 | GRAIN_QUALITY | 291 |
| GRAIN_PERFORMANCE_MAS25-20 | GRAIN_QUALITY | 319 |
| GRAIN_PERFORMANCE_MAS25-21 | GRAIN_QUALITY | 281 |
| GRAIN_PERFORMANCE_MAS25-22 | GRAIN_QUALITY | 87 |
| GRAIN_PERFORMANCE_MAS25-22 | GRAIN_QUALITY | 87 |
| GRAIN_PERFORMANCE_MAS25-23 | GRAIN_QUALITY | 131 |
| GRAIN_PERFORMANCE_MAS25-23 | GRAIN_QUALITY | 25 |
| GRAIN_PERFORMANCE_MAS25-23 | GRAIN_QUALITY | 197 |
| GRAIN_PERFORMANCE_MAS25-23 | GRAIN_QUALITY | 131 |
| GRAIN_PERFORMANCE_MAS25-23 | GRAIN_QUALITY | 25 |
| GRAIN_PERFORMANCE_MAS25-31 | GRAIN_QUALITY | 71 |
| GRAIN_PERFORMANCE_MAS25-31 | GRAIN_QUALITY | 131 |
| GRAIN_PERFORMANCE_MAS25-31 | GRAIN_QUALITY | 349 |
| GRAIN_PERFORMANCE_MAS25-31 | GRAIN_QUALITY | 197 |
| GRAIN_PERFORMANCE_MAS25-31 | GRAIN_QUALITY | 263 |
| GRAIN_PERFORMANCE_MAS25-31 | GRAIN_QUALITY | 131 |
| GRAIN_PERFORMANCE_MAS25-31 | GRAIN_QUALITY | 257 |
| GRAIN_PERFORMANCE_MAS25-31 | GRAIN_QUALITY | 263 |
| GRAIN_PERFORMANCE_MAS25-31 | GRAIN_QUALITY | 349 |
| GRAIN_PERFORMANCE_MAS25-31 | GRAIN_QUALITY | 321 |
| GRAIN_PERFORMANCE_MAS25-31 | GRAIN_QUALITY | 263 |
| GRAIN_PERFORMANCE_MAS25-31 | GRAIN_QUALITY | 237 |
| GRAIN_PERFORMANCE_MAS25-34 | GRAIN_QUALITY | 99 |
| GRAIN_PERFORMANCE_MAS25-34 | GRAIN_QUALITY | 331 |
| GRAIN_PERFORMANCE_MAS25-34 | GRAIN_QUALITY | 331 |
| GRAIN_PERFORMANCE_MAS25-36 | GRAIN_QUALITY | 291 |
| GRAIN_PERFORMANCE_MAS25-36 | GRAIN_QUALITY | 291 |
| GRAIN_PERFORMANCE_MAS25-36 | GRAIN_QUALITY | 291 |
| GRAIN_PERFORMANCE_MAS25-36 | GRAIN_QUALITY | 291 |
| GRAIN_PERFORMANCE_MAS25-36 | GRAIN_QUALITY | 291 |
| GRAIN_PERFORMANCE_MAS25-37 | GRAIN_QUALITY | 285 |
| GRAIN_PERFORMANCE_MAS25-37 | GRAIN_QUALITY | 349 |
| GRAIN_PERFORMANCE_MAS25-37 | GRAIN_QUALITY | 349 |
| GRAIN_PERFORMANCE_MAS25-37 | GRAIN_QUALITY | 57 |
| GRAIN_PERFORMANCE_MAS25-37 | GRAIN_QUALITY | 285 |
| GRAIN_PERFORMANCE_MAS25-39 | GRAIN_QUALITY | 349 |
| GRAIN_PERFORMANCE_MAS25-39 | GRAIN_QUALITY | 349 |
| GRAIN_PERFORMANCE_MAS25-39 | GRAIN_QUALITY | 57 |
| GRAIN_PERFORMANCE_MAS25-4 | GRAIN_QUALITY | 25 |
| GRAIN_PERFORMANCE_MAS25-4 | GRAIN_QUALITY | 25 |
| GRAIN_PERFORMANCE_MAS25-43 | GRAIN_QUALITY | 257 |
| GRAIN_PERFORMANCE_MAS25-48 | GRAIN_QUALITY | 319 |
| GRAIN_PERFORMANCE_MAS25-5 | GRAIN_QUALITY | 131 |
| GRAIN_PERFORMANCE_MAS25-5 | GRAIN_QUALITY | 87 |
| GRAIN_PERFORMANCE_MAS25-5 | GRAIN_QUALITY | 349 |
| GRAIN_PERFORMANCE_MAS25-5 | GRAIN_QUALITY | 197 |
| GRAIN_PERFORMANCE_MAS25-5 | GRAIN_QUALITY | 331 |
| GRAIN_PERFORMANCE_MAS25-5 | GRAIN_QUALITY | 131 |
| GRAIN_PERFORMANCE_MAS25-5 | GRAIN_QUALITY | 349 |
| GRAIN_PERFORMANCE_MAS25-5 | GRAIN_QUALITY | 331 |
| GRAIN_PERFORMANCE_MAS25-5 | GRAIN_QUALITY | 87 |
| GRAIN_PERFORMANCE_MAS25-5 | GRAIN_QUALITY | 319 |
| GRAIN_PERFORMANCE_MAS25-6 | GRAIN_QUALITY | 87 |
| GRAIN_PERFORMANCE_MAS25-6 | GRAIN_QUALITY | 87 |
| GRAIN_PERFORMANCE_MAS25-7 | GRAIN_QUALITY | 319 |
| GRAIN_PERFORMANCE_MAS25-9 | GRAIN_QUALITY | 285 |
| GRAIN_PERFORMANCE_MAS25-9 | GRAIN_QUALITY | 87 |
| GRAIN_PERFORMANCE_MAS25-9 | GRAIN_QUALITY | 87 |
| GRAIN_PERFORMANCE_MAS25-9 | GRAIN_QUALITY | 285 |
| GRAIN_PERFORMANCE_MAS27-1 | GRAIN_QUALITY | 285 |
| GRAIN_PERFORMANCE_MAS27-1 | GRAIN_QUALITY | 349 |
| GRAIN_PERFORMANCE_MAS27-1 | GRAIN_QUALITY | 349 |
| GRAIN_PERFORMANCE_MAS27-1 | GRAIN_QUALITY | 57 |
| GRAIN_PERFORMANCE_MAS27-1 | GRAIN_QUALITY | 285 |
| GRAIN_PERFORMANCE_MAS27-11 | GRAIN_QUALITY | 291 |
| GRAIN_PERFORMANCE_MAS27-11 | GRAIN_QUALITY | 291 |
| GRAIN_PERFORMANCE_MAS27-11 | GRAIN_QUALITY | 87 |
| GRAIN_PERFORMANCE_MAS27-11 | GRAIN_QUALITY | 291 |
| GRAIN_PERFORMANCE_MAS27-11 | GRAIN_QUALITY | 291 |
| GRAIN_PERFORMANCE_MAS27-11 | GRAIN_QUALITY | 87 |
| GRAIN_PERFORMANCE_MAS27-11 | GRAIN_QUALITY | 291 |
| GRAIN_PERFORMANCE_MAS27-12 | GRAIN_QUALITY | 257 |
| GRAIN_PERFORMANCE_MAS27-14 | GRAIN_QUALITY | 87 |
| GRAIN_PERFORMANCE_MAS27-14 | GRAIN_QUALITY | 87 |
| GRAIN_PERFORMANCE_MAS27-16 | GRAIN_QUALITY | 87 |
| GRAIN_PERFORMANCE_MAS27-16 | GRAIN_QUALITY | 87 |
| GRAIN_PERFORMANCE_MAS27-19 | GRAIN_QUALITY | 285 |
| GRAIN_PERFORMANCE_MAS27-19 | GRAIN_QUALITY | 349 |
| GRAIN_PERFORMANCE_MAS27-19 | GRAIN_QUALITY | 349 |
| GRAIN_PERFORMANCE_MAS27-19 | GRAIN_QUALITY | 57 |
| GRAIN_PERFORMANCE_MAS27-19 | GRAIN_QUALITY | 285 |
| GRAIN_PERFORMANCE_MAS27-2 | GRAIN_QUALITY | 87 |
| GRAIN_PERFORMANCE_MAS27-2 | GRAIN_QUALITY | 87 |
| GRAIN_PERFORMANCE_MAS27-6 | GRAIN_QUALITY | 131 |
| GRAIN_PERFORMANCE_MAS27-6 | GRAIN_QUALITY | 197 |
| GRAIN_PERFORMANCE_MAS27-6 | GRAIN_QUALITY | 263 |
| GRAIN_PERFORMANCE_MAS27-6 | GRAIN_QUALITY | 131 |
| GRAIN_PERFORMANCE_MAS27-6 | GRAIN_QUALITY | 257 |
| GRAIN_PERFORMANCE_MAS27-6 | GRAIN_QUALITY | 263 |
| GRAIN_PERFORMANCE_MAS27-6 | GRAIN_QUALITY | 263 |
| GRAIN_PERFORMANCE_MAS27-6 | GRAIN_QUALITY | 237 |
| GRAIN_PERFORMANCE_MAS27-7 | GRAIN_QUALITY | 131 |
| GRAIN_PERFORMANCE_MAS27-7 | GRAIN_QUALITY | 87 |
| GRAIN_PERFORMANCE_MAS27-7 | GRAIN_QUALITY | 349 |
| GRAIN_PERFORMANCE_MAS27-7 | GRAIN_QUALITY | 197 |
| GRAIN_PERFORMANCE_MAS27-7 | GRAIN_QUALITY | 331 |
| GRAIN_PERFORMANCE_MAS27-7 | GRAIN_QUALITY | 131 |
| GRAIN_PERFORMANCE_MAS27-7 | GRAIN_QUALITY | 349 |
| GRAIN_PERFORMANCE_MAS27-7 | GRAIN_QUALITY | 331 |
| GRAIN_PERFORMANCE_MAS27-7 | GRAIN_QUALITY | 87 |
| GRAIN_PERFORMANCE_MAS27-7 | GRAIN_QUALITY | 319 |
| GRAIN_PERFORMANCE_MAS27-8 | GRAIN_QUALITY | 291 |
| GRAIN_PERFORMANCE_MAS27-8 | GRAIN_QUALITY | 291 |
| GRAIN_PERFORMANCE_MAS27-8 | GRAIN_QUALITY | 291 |
| GRAIN_PERFORMANCE_MAS27-8 | GRAIN_QUALITY | 291 |
| GRAIN_PERFORMANCE_MAS27-8 | GRAIN_QUALITY | 291 |
| GRAIN_PERFORMANCE_MAS27-9 | GRAIN_QUALITY | 285 |
| GRAIN_PERFORMANCE_MAS27-9 | GRAIN_QUALITY | 87 |
| GRAIN_PERFORMANCE_MAS27-9 | GRAIN_QUALITY | 331 |
| GRAIN_PERFORMANCE_MAS27-9 | GRAIN_QUALITY | 331 |
| GRAIN_PERFORMANCE_MAS27-9 | GRAIN_QUALITY | 87 |
| GRAIN_PERFORMANCE_MAS27-9 | GRAIN_QUALITY | 57 |
| GRAIN_PERFORMANCE_MAS27-9 | GRAIN_QUALITY | 285 |
| GRAIN_PERFORMANCE_MAS27-9 | GRAIN_QUALITY | 217 |
| GRAIN_PERFORMANCE_SMS015-1 | GRAIN_QUALITY | 257 |
| GRAIN_PERFORMANCE_SMS015-2 | GRAIN_QUALITY | 349 |
| GRAIN_PERFORMANCE_SMS015-2 | GRAIN_QUALITY | 349 |
| GRAIN_PERFORMANCE_SMS015-2 | GRAIN_QUALITY | 57 |
| GRAIN_PERFORMANCE_SMS015-37 | GRAIN_QUALITY | 285 |
| GRAIN_PERFORMANCE_SMS015-37 | GRAIN_QUALITY | 87 |
| GRAIN_PERFORMANCE_SMS015-37 | GRAIN_QUALITY | 87 |
| GRAIN_PERFORMANCE_SMS015-37 | GRAIN_QUALITY | 285 |
| GRAIN_PERFORMANCE_SMS015-37 | GRAIN_QUALITY | 217 |
| GRAIN_PERFORMANCE_SMS015-38 | GRAIN_QUALITY | 263 |
| GRAIN_PERFORMANCE_SMS015-38 | GRAIN_QUALITY | 263 |
| GRAIN_PERFORMANCE_SMS015-38 | GRAIN_QUALITY | 263 |
| GRAIN_PERFORMANCE_SMS015-39 | GRAIN_QUALITY | 281 |
| GRAIN_PERFORMANCE_SMS015-41 | GRAIN_QUALITY | 291 |
| GRAIN_PERFORMANCE_SMS015-41 | GRAIN_QUALITY | 273 |
| GRAIN_PERFORMANCE_SMS015-41 | GRAIN_QUALITY | 71 |
| GRAIN_PERFORMANCE_SMS015-41 | GRAIN_QUALITY | 291 |
| GRAIN_PERFORMANCE_SMS015-41 | GRAIN_QUALITY | 25 |
| GRAIN_PERFORMANCE_SMS015-41 | GRAIN_QUALITY | 273 |
| GRAIN_PERFORMANCE_SMS015-41 | GRAIN_QUALITY | 291 |
| GRAIN_PERFORMANCE_SMS015-41 | GRAIN_QUALITY | 291 |
| GRAIN_PERFORMANCE_SMS015-41 | GRAIN_QUALITY | 273 |
| GRAIN_PERFORMANCE_SMS015-41 | GRAIN_QUALITY | 25 |
| GRAIN_PERFORMANCE_SMS015-41 | GRAIN_QUALITY | 57 |
| GRAIN_PERFORMANCE_SMS015-41 | GRAIN_QUALITY | 291 |
| GRAIN_PERFORMANCE_SMS015-41 | GRAIN_QUALITY | 273 |
| GRAIN_PERFORMANCE_SMS015-41 | GRAIN_QUALITY | 33 |
| GRAIN_PERFORMANCE_SMS015-42 | GRAIN_QUALITY | 285 |
| GRAIN_PERFORMANCE_SMS015-42 | GRAIN_QUALITY | 263 |
| GRAIN_PERFORMANCE_SMS015-42 | GRAIN_QUALITY | 331 |
| GRAIN_PERFORMANCE_SMS015-42 | GRAIN_QUALITY | 263 |
| GRAIN_PERFORMANCE_SMS015-42 | GRAIN_QUALITY | 331 |
| GRAIN_PERFORMANCE_SMS015-42 | GRAIN_QUALITY | 285 |
| GRAIN_PERFORMANCE_SMS015-42 | GRAIN_QUALITY | 263 |
| GRAIN_PERFORMANCE_SMS015-51 | GRAIN_QUALITY | 285 |
| GRAIN_PERFORMANCE_SMS015-51 | GRAIN_QUALITY | 87 |
| GRAIN_PERFORMANCE_SMS015-51 | GRAIN_QUALITY | 87 |
| GRAIN_PERFORMANCE_SMS015-51 | GRAIN_QUALITY | 285 |
| GRAIN_PERFORMANCE_SMS021-21 | GRAIN_QUALITY | 285 |
| GRAIN_PERFORMANCE_SMS021-21 | GRAIN_QUALITY | 359 |
| GRAIN_PERFORMANCE_SMS021-21 | GRAIN_QUALITY | 233 |
| GRAIN_PERFORMANCE_SMS021-21 | GRAIN_QUALITY | 359 |
| GRAIN_PERFORMANCE_SMS021-21 | GRAIN_QUALITY | 233 |
| GRAIN_PERFORMANCE_SMS021-21 | GRAIN_QUALITY | 281 |
| GRAIN_PERFORMANCE_SMS021-21 | GRAIN_QUALITY | 233 |
| GRAIN_PERFORMANCE_SMS021-21 | GRAIN_QUALITY | 285 |
| GRAIN_PERFORMANCE_SMS021-21 | GRAIN_QUALITY | 233 |
| GRAIN_PERFORMANCE_SMS021-21 | GRAIN_QUALITY | 33 |
| GRAIN_PERFORMANCE_SMS021-38 | GRAIN_QUALITY | 71 |
| GRAIN_PERFORMANCE_SMS021-38 | GRAIN_QUALITY | 217 |
| GRAIN_PERFORMANCE_SMS021-39 | GRAIN_QUALITY | 39 |
| GRAIN_PERFORMANCE_SMS021-41 | GRAIN_QUALITY | 285 |
| GRAIN_PERFORMANCE_SMS021-41 | GRAIN_QUALITY | 131 |
| GRAIN_PERFORMANCE_SMS021-41 | GRAIN_QUALITY | 349 |
| GRAIN_PERFORMANCE_SMS021-41 | GRAIN_QUALITY | 197 |
| GRAIN_PERFORMANCE_SMS021-41 | GRAIN_QUALITY | 263 |
| GRAIN_PERFORMANCE_SMS021-41 | GRAIN_QUALITY | 131 |
| GRAIN_PERFORMANCE_SMS021-41 | GRAIN_QUALITY | 263 |
| GRAIN_PERFORMANCE_SMS021-41 | GRAIN_QUALITY | 349 |
| GRAIN_PERFORMANCE_SMS021-41 | GRAIN_QUALITY | 285 |
| GRAIN_PERFORMANCE_SMS021-41 | GRAIN_QUALITY | 263 |
| GRAIN_PERFORMANCE_SMS021-41 | GRAIN_QUALITY | 237 |
| GRAIN_PERFORMANCE_SMS021-42 | GRAIN_QUALITY | 87 |
| GRAIN_PERFORMANCE_SMS021-42 | GRAIN_QUALITY | 87 |
| GRAIN_PERFORMANCE_SMS021-43 | GRAIN_QUALITY | 39 |
| GRAIN_PERFORMANCE_SMS021-44 | GRAIN_QUALITY | 71 |
| GRAIN_PERFORMANCE_SMS021-44 | GRAIN_QUALITY | 349 |
| GRAIN_PERFORMANCE_SMS021-44 | GRAIN_QUALITY | 349 |
| GRAIN_PERFORMANCE_SMS021-44 | GRAIN_QUALITY | 321 |
| GRAIN_PERFORMANCE_SMS021-45 | GRAIN_QUALITY | 131 |
| GRAIN_PERFORMANCE_SMS021-45 | GRAIN_QUALITY | 197 |
| GRAIN_PERFORMANCE_SMS021-45 | GRAIN_QUALITY | 131 |
| GRAIN_PERFORMANCE_SMS021-45 | GRAIN_QUALITY | 257 |
| GRAIN_PERFORMANCE_SMS021-45 | GRAIN_QUALITY | 319 |
| GRAIN_PERFORMANCE_SMS021-46 | GRAIN_QUALITY | 87 |
| GRAIN_PERFORMANCE_SMS021-46 | GRAIN_QUALITY | 87 |
| GRAIN_PERFORMANCE_SMS021-46 | GRAIN_QUALITY | 217 |
| GRAIN_PERFORMANCE_SMS021-48 | GRAIN_QUALITY | 87 |
| GRAIN_PERFORMANCE_SMS021-48 | GRAIN_QUALITY | 87 |
| GRAIN_PERFORMANCE_SMS021-50 | GRAIN_QUALITY | 25 |
| GRAIN_PERFORMANCE_SMS021-50 | GRAIN_QUALITY | 25 |
| GRAIN_PERFORMANCE_SMS021-69 | GRAIN_QUALITY | 285 |
| GRAIN_PERFORMANCE_SMS021-69 | GRAIN_QUALITY | 359 |
| GRAIN_PERFORMANCE_SMS021-69 | GRAIN_QUALITY | 233 |
| GRAIN_PERFORMANCE_SMS021-69 | GRAIN_QUALITY | 359 |
| GRAIN_PERFORMANCE_SMS021-69 | GRAIN_QUALITY | 233 |
| GRAIN_PERFORMANCE_SMS021-69 | GRAIN_QUALITY | 281 |
| GRAIN_PERFORMANCE_SMS021-69 | GRAIN_QUALITY | 233 |
| GRAIN_PERFORMANCE_SMS021-69 | GRAIN_QUALITY | 285 |
| GRAIN_PERFORMANCE_SMS021-69 | GRAIN_QUALITY | 233 |
| GRAIN_PERFORMANCE_SMS021-69 | GRAIN_QUALITY | 33 |
| GRAIN_PERFORMANCE_SMS021-70 | GRAIN_QUALITY | 349 |
| GRAIN_PERFORMANCE_SMS021-70 | GRAIN_QUALITY | 349 |
| GRAIN_PERFORMANCE_SMS021-70 | GRAIN_QUALITY | 57 |
| GRAIN_PERFORMANCE_SMS021-71 | GRAIN_QUALITY | 25 |
| GRAIN_PERFORMANCE_SMS021-71 | GRAIN_QUALITY | 25 |
| GRAIN_PERFORMANCE_SMS021-72 | GRAIN_QUALITY | 281 |
| GRAIN_PERFORMANCE_SMS021-82 | GRAIN_QUALITY | 319 |
| GRAIN_PERFORMANCE_SMS021-83 | GRAIN_QUALITY | 319 |
| GRAIN_QUALITY_MAS12-18 | GRAIN_QUALITY | 285 |
| GRAIN_QUALITY_MAS12-18 | GRAIN_QUALITY | 131 |
| GRAIN_QUALITY_MAS12-18 | GRAIN_QUALITY | 349 |
| GRAIN_QUALITY_MAS12-18 | GRAIN_QUALITY | 197 |
| GRAIN_QUALITY_MAS12-18 | GRAIN_QUALITY | 263 |
| GRAIN_QUALITY_MAS12-18 | GRAIN_QUALITY | 131 |
| GRAIN_QUALITY_MAS12-18 | GRAIN_QUALITY | 263 |
| GRAIN_QUALITY_MAS12-18 | GRAIN_QUALITY | 349 |
| GRAIN_QUALITY_MAS12-18 | GRAIN_QUALITY | 285 |
| GRAIN_QUALITY_MAS12-18 | GRAIN_QUALITY | 263 |
| GRAIN_QUALITY_MAS12-18 | GRAIN_QUALITY | 237 |
| GRAIN_QUALITY_MAS13-22 | GRAIN_QUALITY | 285 |
| GRAIN_QUALITY_MAS13-22 | GRAIN_QUALITY | 87 |
| GRAIN_QUALITY_MAS13-22 | GRAIN_QUALITY | 87 |
| GRAIN_QUALITY_MAS13-22 | GRAIN_QUALITY | 285 |
| GRAIN_QUALITY_MAS13-24 | GRAIN_QUALITY | 257 |
| GRAIN_QUALITY_MAS13-31 | GRAIN_QUALITY | 87 |
| GRAIN_QUALITY_MAS13-31 | GRAIN_QUALITY | 87 |
| GRAIN_QUALITY_MAS13-32 | GRAIN_QUALITY | 87 |
| GRAIN_QUALITY_MAS13-32 | GRAIN_QUALITY | 87 |
| GRAIN_QUALITY_MAS13-32 | GRAIN_QUALITY | 217 |
| GRAIN_QUALITY_MAS19-14 | GRAIN_QUALITY | 319 |
| GRAIN_QUALITY_MAS24-16 | GRAIN_QUALITY | 285 |
| GRAIN_QUALITY_MAS24-16 | GRAIN_QUALITY | 131 |
| GRAIN_QUALITY_MAS24-16 | GRAIN_QUALITY | 349 |
| GRAIN_QUALITY_MAS24-16 | GRAIN_QUALITY | 197 |
| GRAIN_QUALITY_MAS24-16 | GRAIN_QUALITY | 263 |
| GRAIN_QUALITY_MAS24-16 | GRAIN_QUALITY | 131 |
| GRAIN_QUALITY_MAS24-16 | GRAIN_QUALITY | 263 |
| GRAIN_QUALITY_MAS24-16 | GRAIN_QUALITY | 349 |
| GRAIN_QUALITY_MAS24-16 | GRAIN_QUALITY | 285 |
| GRAIN_QUALITY_MAS24-16 | GRAIN_QUALITY | 263 |
| GRAIN_QUALITY_MAS24-16 | GRAIN_QUALITY | 237 |
| GRAIN_QUALITY_MAS24-2 | GRAIN_QUALITY | 285 |
| GRAIN_QUALITY_MAS24-2 | GRAIN_QUALITY | 87 |
| GRAIN_QUALITY_MAS24-2 | GRAIN_QUALITY | 331 |
| GRAIN_QUALITY_MAS24-2 | GRAIN_QUALITY | 331 |
| GRAIN_QUALITY_MAS24-2 | GRAIN_QUALITY | 87 |
| GRAIN_QUALITY_MAS24-2 | GRAIN_QUALITY | 57 |
| GRAIN_QUALITY_MAS24-2 | GRAIN_QUALITY | 285 |
| GRAIN_QUALITY_MAS24-2 | GRAIN_QUALITY | 217 |
| GRAIN_QUALITY_MAS24-21 | GRAIN_QUALITY | 25 |
| GRAIN_QUALITY_MAS24-21 | GRAIN_QUALITY | 25 |
| GRAIN_QUALITY_MAS24-21 | GRAIN_QUALITY | 321 |
| GRAIN_QUALITY_MAS24-28 | GRAIN_QUALITY | 291 |
| GRAIN_QUALITY_MAS24-28 | GRAIN_QUALITY | 291 |
| MATURITY_MAS25-42 | MATURITY | 87 |
| MATURITY_SMS015-10 | MATURITY | 321 |
| MATURITY_SMS024-1 | MATURITY | 87 |
| MATURITY_SMS024-13 | MATURITY | 87 |
| MATURITY_SMS024-20 | MATURITY | 291 |
| MATURITY_SMS024-20 | MATURITY | 87 |
| MATURITY_SMS024-20 | MATURITY | 291 |
| MATURITY_SMS024-21 | MATURITY | 87 |
| MATURITY_SMS024-22 | MATURITY | 87 |
| MATURITY_SMS024-3 | MATURITY | 87 |
| MATURITY_SMS024-42 | MATURITY | 87 |
| MATURITY_SMS024-44 | MATURITY | 87 |
| MATURITY_SMS024-5 | MATURITY | 87 |
| MATURITY_SMS024-51 | MATURITY | 291 |
| MATURITY_SMS024-51 | MATURITY | 87 |
| MATURITY_SMS024-51 | MATURITY | 291 |
| MATURITY_SMS024-6 | MATURITY | 87 |
| MATURITY_SMS024-60 | MATURITY | 321 |
| MATURITY_SMS024-62 | MATURITY | 321 |
| MATURITY_SMS024-66 | MATURITY | 87 |
| MATURITY_SMS024-72 | MATURITY | 87 |
| MATURITY_SMS024-74 | MATURITY | 87 |
| MATURITY_ZM-ASI-1-3 | MATURITY | 87 |
| MATURITY_ZM-ASI-1-5 | MATURITY | 87 |
| MATURITY_ZM-ASI-10-2 | MATURITY | 87 |
| MATURITY_ZM-ASI-3-4 | MATURITY | 87 |
| MATURITY_ZM-ASI-4-2 | MATURITY | 321 |
| MATURITY_ZM-ASI-5-3 | MATURITY | 321 |
| MATURITY_ZM-ASI-7-2 | MATURITY | 87 |
| MATURITY_ZM-ASI-7-5 | MATURITY | 87 |
| MATURITY_ZM-ASI-8-1 | MATURITY | 321 |
| MATURITY_ZM-DTA-3-1 | MATURITY | 87 |
| MATURITY_ZM-DTA-3-2 | MATURITY | 87 |
| MATURITY_ZM-DTA-4-1 | MATURITY | 273 |
| MATURITY_ZM-DTA-4-1 | MATURITY | 291 |
| MATURITY_ZM-DTA-4-1 | MATURITY | 291 |
| MATURITY_ZM-DTA-4-1 | MATURITY | 273 |
| MATURITY_ZM-DTA-4-2 | MATURITY | 321 |
| MATURITY_ZM-DTA-8-4 | MATURITY | 321 |
| MATURITY_ZM-SILK-3-1 | MATURITY | 87 |
| MATURITY_ZM-SILK-3-2 | MATURITY | 87 |
| MATURITY_ZM-SILK-3-5 | MATURITY | 87 |
| MATURITY_ZM-SILK-4-1 | MATURITY | 273 |
| MATURITY_ZM-SILK-4-1 | MATURITY | 291 |
| MATURITY_ZM-SILK-4-1 | MATURITY | 291 |
| MATURITY_ZM-SILK-4-1 | MATURITY | 273 |
| MATURITY_ZM-SILK-6-2 | MATURITY | 87 |
| MATURITY_ZM-SILK-7-2 | MATURITY | 87 |
| MATURITY_ZM-SILK-8-1 | MATURITY | 321 |
| MATURITY_ZM-SILK-9-3 | MATURITY | 87 |
| PATHOGEN_RESISTANCE_ZM-ADCNLB-3-1 | PATHOGEN RESISTANCE | 285 |
| PATHOGEN_RESISTANCE_ZM-ADCNLB-3-1 | PATHOGEN RESISTANCE | 87 |
| PATHOGEN_RESISTANCE_ZM-ADCNLB-3-1 | PATHOGEN RESISTANCE | 285 |
| PATHOGEN_RESISTANCE_ZM-ADCNLB-3-2 | PATHOGEN RESISTANCE | 285 |
| PATHOGEN_RESISTANCE_ZM-ADCNLB-3-2 | PATHOGEN RESISTANCE | 87 |
| PATHOGEN_RESISTANCE_ZM-ADCNLB-3-2 | PATHOGEN RESISTANCE | 285 |
| PATHOGEN_RESISTANCE_ZM-ADCNLB-5-1 | PATHOGEN RESISTANCE | 25 |
| PATHOGEN_RESISTANCE_ZM-ADCNLB-5-1 | PATHOGEN RESISTANCE | 25 |
| PATHOGEN_RESISTANCE_ZM-ADCNLB-5-2 | PATHOGEN RESISTANCE | 25 |
| PATHOGEN_RESISTANCE_ZM-ADCNLB-5-2 | PATHOGEN RESISTANCE | 25 |
| PATHOGEN_RESISTANCE_ZM-ADCNLB-5-3 | PATHOGEN RESISTANCE | 305 |
| PATHOGEN_RESISTANCE_ZM-ADCNLB-5-3 | PATHOGEN RESISTANCE | 321 |
| PATHOGEN_RESISTANCE_ZM-ADCNLB-9-1 | PATHOGEN RESISTANCE | 309 |
| PATHOGEN_RESISTANCE_ZM-ADCNLB-9-1 | PATHOGEN RESISTANCE | 131 |
| PATHOGEN_RESISTANCE_ZM-ADCNLB-9-1 | PATHOGEN RESISTANCE | 257 |
| PATHOGEN_RESISTANCE_ZM-ADCNLB-9-1 | PATHOGEN RESISTANCE | 319 |
| PATHOGEN_RESISTANCE_ZM-ANMT-1-1 | PATHOGEN RESISTANCE | 257 |
| PATHOGEN_RESISTANCE_ZM-ANMT-1-2 | PATHOGEN RESISTANCE | 257 |
| PATHOGEN_RESISTANCE_ZM-ANMT-10-1 | PATHOGEN RESISTANCE | 87 |
| PATHOGEN_RESISTANCE_ZM-ANMT-10-1 | PATHOGEN RESISTANCE | 217 |
| PATHOGEN_RESISTANCE_ZM-ANMT-10-2 | PATHOGEN RESISTANCE | 87 |
| PATHOGEN_RESISTANCE_ZM-ANMT-10-2 | PATHOGEN RESISTANCE | 217 |
| PATHOGEN_RESISTANCE_ZM-ANMT-2-1 | PATHOGEN RESISTANCE | 87 |
| PATHOGEN_RESISTANCE_ZM-ANMT-2-1 | PATHOGEN RESISTANCE | 217 |
| PATHOGEN_RESISTANCE_ZM-ANMT-5-1 | PATHOGEN RESISTANCE | 263 |
| PATHOGEN_RESISTANCE_ZM-ANMT-5-1 | PATHOGEN RESISTANCE | 331 |
| PATHOGEN_RESISTANCE_ZM-ANMT-5-1 | PATHOGEN RESISTANCE | 263 |
| PATHOGEN_RESISTANCE_ZM-ANMT-5-1 | PATHOGEN RESISTANCE | 263 |
| PATHOGEN_RESISTANCE_ZM-APIT-1-1 | PATHOGEN RESISTANCE | 257 |
| PATHOGEN_RESISTANCE_ZM-APIT-1-2 | PATHOGEN RESISTANCE | 257 |
| PATHOGEN_RESISTANCE_ZM-APIT-10-1 | PATHOGEN RESISTANCE | 87 |
| PATHOGEN_RESISTANCE_ZM-APIT-10-1 | PATHOGEN RESISTANCE | 217 |
| PATHOGEN_RESISTANCE_ZM-APIT-10-2 | PATHOGEN RESISTANCE | 87 |
| PATHOGEN_RESISTANCE_ZM-APIT-10-2 | PATHOGEN RESISTANCE | 217 |
| PATHOGEN_RESISTANCE_ZM-APIT-2-1 | PATHOGEN RESISTANCE | 359 |
| PATHOGEN_RESISTANCE_ZM-APIT-2-1 | PATHOGEN RESISTANCE | 359 |
| PATHOGEN_RESISTANCE_ZM-APIT-2-1 | PATHOGEN RESISTANCE | 217 |
| PATHOGEN_RESISTANCE_ZM-APIT-2-1 | PATHOGEN RESISTANCE | 33 |
| PATHOGEN_RESISTANCE_ZM-APIT-3-1 | PATHOGEN RESISTANCE | 349 |
| PATHOGEN_RESISTANCE_ZM-APIT-3-1 | PATHOGEN RESISTANCE | 349 |
| PATHOGEN_RESISTANCE_ZM-APIT-3-1 | PATHOGEN RESISTANCE | 57 |
| PATHOGEN_RESISTANCE_ZM-APIT-3-2 | PATHOGEN RESISTANCE | 285 |
| PATHOGEN_RESISTANCE_ZM-APIT-3-2 | PATHOGEN RESISTANCE | 257 |
| PATHOGEN_RESISTANCE_ZM-APIT-3-2 | PATHOGEN RESISTANCE | 285 |
| PATHOGEN_RESISTANCE_ZM-APIT-6-1 | PATHOGEN RESISTANCE | 285 |
| PATHOGEN_RESISTANCE_ZM-APIT-6-1 | PATHOGEN RESISTANCE | 349 |
| PATHOGEN_RESISTANCE_ZM-APIT-6-1 | PATHOGEN RESISTANCE | 263 |
| PATHOGEN_RESISTANCE_ZM-APIT-6-1 | PATHOGEN RESISTANCE | 131 |
| PATHOGEN_RESISTANCE_ZM-APIT-6-1 | PATHOGEN RESISTANCE | 257 |
| PATHOGEN_RESISTANCE_ZM-APIT-6-1 | PATHOGEN RESISTANCE | 263 |
| PATHOGEN_RESISTANCE_ZM-APIT-6-1 | PATHOGEN RESISTANCE | 349 |
| PATHOGEN_RESISTANCE_ZM-APIT-6-1 | PATHOGEN RESISTANCE | 285 |
| PATHOGEN_RESISTANCE_ZM-APIT-6-1 | PATHOGEN RESISTANCE | 263 |
| PATHOGEN_RESISTANCE_ZM-APIT-6-1 | PATHOGEN RESISTANCE | 237 |
| PATHOGEN_RESISTANCE_ZM-APIT-9-1 | PATHOGEN RESISTANCE | 285 |
| PATHOGEN_RESISTANCE_ZM-APIT-9-1 | PATHOGEN RESISTANCE | 87 |
| PATHOGEN_RESISTANCE_ZM-APIT-9-1 | PATHOGEN RESISTANCE | 285 |
| PATHOGEN_RESISTANCE_ZM-APIT-9-1 | PATHOGEN RESISTANCE | 217 |
| PATHOGEN_RESISTANCE_ZM-AUT-1-1 | PATHOGEN RESISTANCE | 257 |
| PATHOGEN_RESISTANCE_ZM-AUT-1-2 | PATHOGEN RESISTANCE | 257 |
| PATHOGEN_RESISTANCE_ZM-AUT-10-1 | PATHOGEN RESISTANCE | 87 |
| PATHOGEN_RESISTANCE_ZM-AUT-10-1 | PATHOGEN RESISTANCE | 217 |
| PATHOGEN_RESISTANCE_ZM-AUT-10-2 | PATHOGEN RESISTANCE | 87 |
| PATHOGEN_RESISTANCE_ZM-AUT-10-2 | PATHOGEN RESISTANCE | 217 |
| PATHOGEN_RESISTANCE_ZM-AUT-3-1 | PATHOGEN RESISTANCE | 285 |
| PATHOGEN_RESISTANCE_ZM-AUT-3-1 | PATHOGEN RESISTANCE | 257 |
| PATHOGEN_RESISTANCE_ZM-AUT-3-1 | PATHOGEN RESISTANCE | 285 |
| PATHOGEN_RESISTANCE_ZM-AUT-6-1 | PATHOGEN RESISTANCE | 285 |
| PATHOGEN_RESISTANCE_ZM-AUT-6-1 | PATHOGEN RESISTANCE | 349 |
| PATHOGEN_RESISTANCE_ZM-AUT-6-1 | PATHOGEN RESISTANCE | 263 |
| PATHOGEN_RESISTANCE_ZM-AUT-6-1 | PATHOGEN RESISTANCE | 131 |
| PATHOGEN_RESISTANCE_ZM-AUT-6-1 | PATHOGEN RESISTANCE | 257 |
| PATHOGEN_RESISTANCE_ZM-AUT-6-1 | PATHOGEN RESISTANCE | 263 |
| PATHOGEN_RESISTANCE_ZM-AUT-6-1 | PATHOGEN RESISTANCE | 349 |
| PATHOGEN_RESISTANCE_ZM-AUT-6-1 | PATHOGEN RESISTANCE | 285 |
| PATHOGEN_RESISTANCE_ZM-AUT-6-1 | PATHOGEN RESISTANCE | 263 |
| PATHOGEN_RESISTANCE_ZM-AUT-6-1 | PATHOGEN RESISTANCE | 237 |
| PATHOGEN_RESISTANCE_ZM-CELW-5-1 | PATHOGEN RESISTANCE | 291 |
| PATHOGEN_RESISTANCE_ZM-CELW-6-1 | PATHOGEN RESISTANCE | 87 |
| PATHOGEN_RESISTANCE_ZM-CELW-6-1 | PATHOGEN RESISTANCE | 349 |
| PATHOGEN_RESISTANCE_ZM-CELW-6-1 | PATHOGEN RESISTANCE | 331 |
| PATHOGEN_RESISTANCE_ZM-CELW-6-1 | PATHOGEN RESISTANCE | 131 |
| PATHOGEN_RESISTANCE_ZM-CELW-6-1 | PATHOGEN RESISTANCE | 349 |
| PATHOGEN_RESISTANCE_ZM-CELW-6-1 | PATHOGEN RESISTANCE | 319 |
| PATHOGEN_RESISTANCE_ZM-CRR-1-10 | PATHOGEN RESISTANCE | 285 |
| PATHOGEN_RESISTANCE_ZM-CRR-1-10 | PATHOGEN RESISTANCE | 87 |
| PATHOGEN_RESISTANCE_ZM-CRR-1-10 | PATHOGEN RESISTANCE | 285 |
| PATHOGEN_RESISTANCE_ZM-CRR-1-10 | PATHOGEN RESISTANCE | 217 |
| PATHOGEN_RESISTANCE_ZM-CRR-1-11 | PATHOGEN RESISTANCE | 257 |
| PATHOGEN_RESISTANCE_ZM-CRR-1-12 | PATHOGEN RESISTANCE | 285 |
| PATHOGEN_RESISTANCE_ZM-CRR-1-12 | PATHOGEN RESISTANCE | 87 |
| PATHOGEN_RESISTANCE_ZM-CRR-1-12 | PATHOGEN RESISTANCE | 285 |
| PATHOGEN_RESISTANCE_ZM-CRR-1-12 | PATHOGEN RESISTANCE | 217 |
| PATHOGEN_RESISTANCE_ZM-CRR-1-13 | PATHOGEN RESISTANCE | 257 |
| PATHOGEN_RESISTANCE_ZM-CRR-1-14 | PATHOGEN RESISTANCE | 71 |
| PATHOGEN_RESISTANCE_ZM-CRR-1-14 | PATHOGEN RESISTANCE | 217 |
| PATHOGEN_RESISTANCE_ZM-CRR-1-14 | PATHOGEN RESISTANCE | 319 |
| PATHOGEN_RESISTANCE_ZM-CRR-1-15 | PATHOGEN RESISTANCE | 257 |
| PATHOGEN_RESISTANCE_ZM-CRR-2-11 | PATHOGEN RESISTANCE | 359 |
| PATHOGEN_RESISTANCE_ZM-CRR-2-11 | PATHOGEN RESISTANCE | 359 |
| PATHOGEN_RESISTANCE_ZM-CRR-2-11 | PATHOGEN RESISTANCE | 217 |
| PATHOGEN_RESISTANCE_ZM-CRR-2-11 | PATHOGEN RESISTANCE | 33 |
| PATHOGEN_RESISTANCE_ZM-CRR-3-6 | PATHOGEN RESISTANCE | 349 |
| PATHOGEN_RESISTANCE_ZM-CRR-3-6 | PATHOGEN RESISTANCE | 349 |
| PATHOGEN_RESISTANCE_ZM-CRR-3-6 | PATHOGEN RESISTANCE | 57 |
| PATHOGEN_RESISTANCE_ZM-CRR-3-7 | PATHOGEN RESISTANCE | 285 |
| PATHOGEN_RESISTANCE_ZM-CRR-3-7 | PATHOGEN RESISTANCE | 87 |
| PATHOGEN_RESISTANCE_ZM-CRR-3-7 | PATHOGEN RESISTANCE | 285 |
| PATHOGEN_RESISTANCE_ZM-CRR-3-8 | PATHOGEN RESISTANCE | 285 |
| PATHOGEN_RESISTANCE_ZM-CRR-3-8 | PATHOGEN RESISTANCE | 87 |
| PATHOGEN_RESISTANCE_ZM-CRR-3-8 | PATHOGEN RESISTANCE | 285 |
| PATHOGEN_RESISTANCE_ZM-CRR-3-9 | PATHOGEN RESISTANCE | 285 |
| PATHOGEN_RESISTANCE_ZM-CRR-3-9 | PATHOGEN RESISTANCE | 87 |
| PATHOGEN_RESISTANCE_ZM-CRR-3-9 | PATHOGEN RESISTANCE | 257 |
| PATHOGEN_RESISTANCE_ZM-CRR-3-9 | PATHOGEN RESISTANCE | 285 |
| PATHOGEN_RESISTANCE_ZM-CRR-4-3 | PATHOGEN RESISTANCE | 25 |
| PATHOGEN_RESISTANCE_ZM-CRR-4-3 | PATHOGEN RESISTANCE | 59 |
| PATHOGEN_RESISTANCE_ZM-CRR-4-3 | PATHOGEN RESISTANCE | 131 |
| PATHOGEN_RESISTANCE_ZM-CRR-4-3 | PATHOGEN RESISTANCE | 25 |
| PATHOGEN_RESISTANCE_ZM-CRR-4-4 | PATHOGEN RESISTANCE | 291 |
| PATHOGEN_RESISTANCE_ZM-CRR-4-4 | PATHOGEN RESISTANCE | 71 |
| PATHOGEN_RESISTANCE_ZM-CRR-4-4 | PATHOGEN RESISTANCE | 25 |
| PATHOGEN_RESISTANCE_ZM-CRR-4-4 | PATHOGEN RESISTANCE | 59 |
| PATHOGEN_RESISTANCE_ZM-CRR-4-4 | PATHOGEN RESISTANCE | 273 |
| PATHOGEN_RESISTANCE_ZM-CRR-4-4 | PATHOGEN EESISTANCE | 273 |
| PATHOGEN_RESISTANCE_ZM-CRR-4-4 | PATHOGEN RESISTANCE | 25 |
| PATHOGEN_RESISTANCE_ZM-CRR-4-4 | PATHOGEN RESISTANCE | 57 |
| PATHOGEN_RESISTANCE_ZM-CRR-4-4 | PATHOGEN RESISTANCE | 273 |
| PATHOGEN_RESISTANCE_ZM-CRR-4-4 | PATHOGEN RESISTANCE | 33 |
| PATHOGEN_RESISTANCE_ZM-CRR-4-5 | PATHOGEN RESISTANCE | 99 |
| PATHOGEN_RESISTANCE_ZM-CRR-4-5 | PATHOGEN RESISTANCE | 25 |
| PATHOGEN_RESISTANCE_ZM-CRR-4-5 | PATHOGEN RESISTANCE | 131 |
| PATHOGEN_RESISTANCE_ZM-CRR-4-5 | PATHOGEN RESISTANCE | 25 |
| PATHOGEN_RESISTANCE_ZM-CRR-4-6 | PATHOGEN RESISTANCE | 291 |
| PATHOGEN_RESISTANCE_ZM-CRR-4-6 | PATHOGEN RESISTANCE | 71 |
| PATHOGEN_RESISTANCE_ZM-CRR-4-6 | PATHOGEN RESISTANCE | 25 |
| PATHOGEN_RESISTANCE_ZM-CRR-4-6 | PATHOGEN RESISTANCE | 59 |
| PATHOGEN_RESISTANCE_ZM-CRR-4-6 | PATHOGEN RESISTANCE | 273 |
| PATHOGEN_RESISTANCE_ZM-CRR-4-6 | PATHOGEN RESISTANCE | 273 |
| PATHOGEN_RESISTANCE_ZM-CRR-4-6 | PATHOGEN RESISTANCE | 25 |
| PATHOGEN_RESISTANCE_ZM-CRR-4-6 | PATHOGEN RESISTANCE | 57 |
| PATHOGEN_RESISTANCE_ZM-CRR-4-6 | PATHOGEN RESISTANCE | 273 |
| PATHOGEN_RESISTANCE_ZM-CRR-4-6 | PATHOGEN RESISTANCE | 33 |
| PATHOGEN_RESISTANCE_ZM-CRR-5-6 | PATHOGEN RESISTANCE | 263 |
| PATHOGEN_RESISTANCE_ZM-CRR-5-6 | PATHOGEN RESISTANCE | 331 |
| PATHOGEN_RESISTANCE_ZM-CRR-5-6 | PATHOGEN RESISTANCE | 263 |
| PATHOGEN_RESISTANCE_ZM-CRR-5-6 | PATHOGEN RESISTANCE | 263 |
| PATHOGEN_RESISTANCE_ZM-CRR-5-7 | PATHOGEN RESISTANCE | 291 |
| PATHOGEN_RESISTANCE_ZM-CRR-5-7 | PATHOGEN RESISTANCE | 25 |
| PATHOGEN_RESISTANCE_ZM-CRR-5-7 | PATHOGEN RESISTANCE | 25 |
| PATHOGEN_RESISTANCE_ZM-CRR-5-9 | PATHOGEN RESISTANCE | 291 |
| PATHOGEN_RESISTANCE_ZM-CRR-6-4 | PATHOGEN RESISTANCE | 263 |
| PATHOGEN_RESISTANCE_ZM-CRR-6-4 | PATHOGEN RESISTANCE | 257 |
| PATHOGEN_RESISTANCE_ZM-CRR-6-4 | PATHOGEN RESISTANCE | 263 |
| PATHOGEN_RESISTANCE_ZM-CRR-6-4 | PATHOGEN RESISTANCE | 263 |
| PATHOGEN_RESISTANCE_ZM-CRR-6-5 | PATHOGEN RESISTANCE | 285 |
| PATHOGEN_RESISTANCE_ZM-CRR-6-5 | PATHOGEN RESISTANCE | 349 |
| PATHOGEN_RESISTANCE_ZM-CRR-6-5 | PATHOGEN RESISTANCE | 263 |
| PATHOGEN_RESISTANCE_ZM-CRR-6-5 | PATHOGEN RESISTANCE | 131 |
| PATHOGEN_RESISTANCE_ZM-CRR-6-5 | PATHOGEN RESISTANCE | 263 |
| PATHOGEN_RESISTANCE_ZM-CRR-6-5 | PATHOGEN RESISTANCE | 349 |
| PATHOGEN_RESISTANCE_ZM-CRR-6-5 | PATHOGEN RESISTANCE | 285 |
| PATHOGEN_RESISTANCE_ZM-CRR-6-5 | PATHOGEN RESISTANCE | 263 |
| PATHOGEN_RESISTANCE_ZM-CRR-6-5 | PATHOGEN RESISTANCE | 237 |
| PATHOGEN_RESISTANCE_ZM-CRR-6-6 | PATHOGEN RESISTANCE | 349 |
| PATHOGEN_RESISTANCE_ZM-CRR-6-6 | PATHOGEN RESISTANCE | 131 |
| PATHOGEN_RESISTANCE_ZM-CRR-6-6 | PATHOGEN RESISTANCE | 349 |
| PATHOGEN_RESISTANCE_ZM-CRR-7-5 | PATHOGEN RESISTANCE | 87 |
| PATHOGEN_RESISTANCE_ZM-CRR-7-6 | PATHOGEN RESISTANCE | 281 |
| PATHOGEN_RESISTANCE_ZM-CRR-8-6 | PATHOGEN RESISTANCE | 71 |
| PATHOGEN_RESISTANCE_ZM-CRR-8-6 | PATHOGEN RESISTANCE | 305 |
| PATHOGEN_RESISTANCE_ZM-CRR-8-6 | PATHOGEN RESISTANCE | 349 |
| PATHOGEN_RESISTANCE_ZM-CRR-8-6 | PATHOGEN RESISTANCE | 263 |
| PATHOGEN_RESISTANCE_ZM-CRR-8-6 | PATHOGEN RESISTANCE | 263 |
| PATHOGEN_RESISTANCE_ZM-CRR-8-6 | PATHOGEN RESISTANCE | 349 |
| PATHOGEN_RESISTANCE_ZM-CRR-8-6 | PATHOGEN RESISTANCE | 321 |
| PATHOGEN_RESISTANCE_ZM-CRR-8-6 | PATHOGEN RESISTANCE | 263 |
| PATHOGEN_RESISTANCE_ZM-CRR-8-7 | PATHOGEN RESISTANCE | 71 |
| PATHOGEN_RESISTANCE_ZM-CRR-8-7 | PATHOGEN RESISTANCE | 305 |
| PATHOGEN_RESISTANCE_ZM-CRR-8-7 | PATHOGEN RESISTANCE | 349 |
| PATHOGEN_RESISTANCE_ZM-CRR-8-7 | PATHOGEN RESISTANCE | 263 |
| PATHOGEN_RESISTANCE_ZM-CRR-8-7 | PATHOGEN RESISTANCE | 263 |
| PATHOGEN_RESISTANCE_ZM-CRR-8-7 | PATHOGEN RESISTANCE | 349 |
| PATHOGEN_RESISTANCE_ZM-CRR-8-7 | PATHOGEN RESISTANCE | 321 |
| PATHOGEN_RESISTANCE_ZM-CRR-8-7 | PATHOGEN RESISTANCE | 263 |
| PATHOGEN_RESISTANCE_ZM-CRR-9-2 | PATHOGEN RESISTANCE | 309 |
| PATHOGEN_RESISTANCE_ZM-CRR-9-2 | PATHOGEN RESISTANCE | 131 |
| PATHOGEN_RESISTANCE_ZM-CRR-9-2 | PATHOGEN RESISTANCE | 257 |
| PATHOGEN_RESISTANCE_ZM-CRR-9-2 | PATHOGEN RESISTANCE | 319 |
| PATHOGEN_RESISTANCE_ZM-CRR-9-3 | PATHOGEN RESISTANCE | 309 |
| PATHOGEN_RESISTANCE_ZM-CRR-9-3 | PATHOGEN RESISTANCE | 131 |
| PATHOGEN_RESISTANCE_ZM-CRR-9-3 | PATHOGEN RESISTANCE | 257 |
| PATHOGEN_RESISTANCE_ZM-CRR-9-3 | PATHOGEN RESISTANCE | 319 |
| PATHOGEN_RESISTANCE_ZM-CRR-9-4 | PATHOGEN RESISTANCE | 285 |
| PATHOGEN_RESISTANCE_ZM-CRR-9-4 | PATHOGEN RESISTANCE | 87 |
| PATHOGEN_RESISTANCE_ZM-CRR-9-4 | PATHOGEN RESISTANCE | 285 |
| PATHOGEN_RESISTANCE_ZM-CRR-9-4 | PATHOGEN RESISTANCE | 217 |
| PATHOGEN_RESISTANCE_ZM-CRR-9-5 | PATHOGEN RESISTANCE | 99 |
| PATHOGEN_RESISTANCE_ZM-CRR-9-5 | PATHOGEN RESISTANCE | 309 |
| PATHOGEN_RESISTANCE_ZM-CRR-9-5 | PATHOGEN RESISTANCE | 331 |
| PATHOGEN_RESISTANCE_ZM-CRR-9-5 | PATHOGEN RESISTANCE | 131 |
| PATHOGEN_RESISTANCE_ZM-CRR-9-5 | PATHOGEN RESISTANCE | 257 |
| PATHOGEN_RESISTANCE_ZM-CRR-9-5 | PATHOGEN RESISTANCE | 319 |
| PATHOGEN_RESISTANCE_ZM-CSVEG-1-1 | PATHOGEN RESISTANCE | 285 |
| PATHOGEN_RESISTANCE_ZM-CSVEG-1-1 | PATHOGEN RESISTANCE | 87 |
| PATHOGEN_RESISTANCE_ZM-CSVEG-1-1 | PATHOGEN RESISTANCE | 285 |
| PATHOGEN_RESISTANCE_ZM-CSVEG-1-1 | PATHOGEN RESISTANCE | 217 |
| PATHOGEN_RESISTANCE_ZM-CSVEG-4-1 | PATHOGEN RESISTANCE | 291 |
| PATHOGEN_RESISTANCE_ZM-CSVEG-4-1 | PATHOGEN RESISTANCE | 71 |
| PATHOGEN_RESISTANCE_ZM-CSVEG-4-1 | PATHOGEN RESISTANCE | 25 |
| PATHOGEN_RESISTANCE_ZM-CSVEG-4-1 | PATHOGEN RESISTANCE | 59 |
| PATHOGEN_RESISTANCE_ZM-CSVEG-4-1 | PATHOGEN RESISTANCE | 273 |
| PATHOGEN_RESISTANCE_ZM-CSVEG-4-1 | PATHOGEN RESISTANCE | 273 |
| PATHOGEN_RESISTANCE_ZM-CSVEG-4-1 | PATHOGEN RESISTANCE | 25 |
| PATHOGEN_RESISTANCE_ZM-CSVEG-4-1 | PATHOGEN RESISTANCE | 57 |
| PATHOGEN_RESISTANCE_ZM-CSVEG-4-1 | PATHOGEN RESISTANCE | 273 |
| PATHOGEN_RESISTANCE_ZM-CSVEG-4-1 | PATHOGEN RESISTANCE | 33 |
| PATHOGEN_RESISTANCE_ZM-CSVEG-4-2 | PATHOGEN RESISTANCE | 99 |
| PATHOGEN_RESISTANCE_ZM-CSVEG-4-2 | PATHOGEN RESISTANCE | 131 |
| PATHOGEN_RESISTANCE_ZM-CSVEG-7-1 | PATHOGEN RESISTANCE | 281 |
| PATHOGEN_RESISTANCE_ZM-CSVEG-9-1 | PATHOGEN RESISTANCE | 309 |
| PATHOGEN_RESISTANCE_ZM-CSVEG-9-1 | PATHOGEN RESISTANCE | 131 |
| PATHOGEN_RESISTANCE_ZM-CSVEG-9-1 | PATHOGEN RESISTANCE | 257 |
| PATHOGEN_RESISTANCE_ZM-CSVEG-9-1 | PATHOGEN RESISTANCE | 319 |
| PATHOGEN_RESISTANCE_ZM-CSVSG-1-1 | PATHOGEN RESISTANCE | 319 |
| PATHOGEN_RESISTANCE_ZM-CSVSG-4-1 | PATHOGEN RESISTANCE | 99 |
| PATHOGEN_RESISTANCE_ZM-CSVSG-4-1 | PATHOGEN RESISTANCE | 131 |
| PATHOGEN_RESISTANCE_ZM-DMS-1-1 | PATHOGEN RESISTANCE | 319 |
| PATHOGEN_RESISTANCE_ZM-DMS-1-2 | PATHOGEN RESISTANCE | 257 |
| PATHOGEN_RESISTANCE_ZM-DMS-9-1 | PATHOGEN RESISTANCE | 285 |
| PATHOGEN_RESISTANCE_ZM-DMS-9-1 | PATHOGEN RESISTANCE | 87 |
| PATHOGEN_RESISTANCE_ZM-DMS-9-1 | PATHOGEN RESISTANCE | 285 |
| PATHOGEN_RESISTANCE_ZM-DMS-9-1 | PATHOGEN RESISTANCE | 217 |
| PATHOGEN_RESISTANCE_ZM-ETURI-2-1 | PATHOGEN RESISTANCE | 291 |
| PATHOGEN_RESISTANCE_ZM-ETURI-2-1 | PATHOGEN RESISTANCE | 87 |
| PATHOGEN_RESISTANCE_ZM-ETURI-5-1 | PATHOGEN RESISTANCE | 25 |
| PATHOGEN_RESISTANCE_ZM-ETURI-5-1 | PATHOGEN RESISTANCE | 25 |
| PATHOGEN_RESISTANCE_ZM-HMAYI-3-1 | PATHOGEN RESISTANCE | 349 |
| PATHOGEN_RESISTANCE_ZM-HMAYI-3-1 | PATHOGEN RESISTANCE | 349 |
| PATHOGEN_RESISTANCE_ZM-HMAYI-3-1 | PATHOGEN RESISTANCE | 57 |
| PATHOGEN_RESISTANCE_ZM-HPVI-3-1 | PATHOGEN RESISTANCE | 349 |
| PATHOGEN_RESISTANCE_ZM-HPVI-3-1 | PATHOGEN RESISTANCE | 349 |
| PATHOGEN_RESISTANCE_ZM-HPVI-3-1 | PATHOGEN RESISTANCE | 57 |
| PATHOGEN_RESISTANCE_ZM-HPVI-6-1 | PATHOGEN RESISTANCE | 87 |
| PATHOGEN_RESISTANCE_ZM-HPVI-6-1 | PATHOGEN RESISTANCE | 349 |
| PATHOGEN_RESISTANCE_ZM-HPVI-6-1 | PATHOGEN RESISTANCE | 331 |
| PATHOGEN_RESISTANCE_ZM-HPVI-6-1 | PATHOGEN RESISTANCE | 131 |
| PATHOGEN_RESISTANCE_ZM-HPVI-6-1 | PATHOGEN RESISTANCE | 349 |
| PATHOGEN_RESISTANCE_ZM-HPVI-6-1 | PATHOGEN RESISTANCE | 319 |
| PATHOGEN_RESISTANCE_ZM-LT-1-1 | PATHOGEN RESISTANCE | 257 |
| PATHOGEN_RESISTANCE_ZM-LT-1-2 | PATHOGEN RESISTANCE | 285 |
| PATHOGEN_RESISTANCE_ZM-LT-1-2 | PATHOGEN RESISTANCE | 87 |
| PATHOGEN_RESISTANCE_ZM-LT-1-2 | PATHOGEN RESISTANCE | 285 |
| PATHOGEN_RESISTANCE_ZM-LT-1-2 | PATHOGEN RESISTANCE | 217 |
| PATHOGEN_RESISTANCE_ZM-LT-4-1 | PATHOGEN RESISTANCE | 59 |
| PATHOGEN_RESISTANCE_ZM-LT-5-1 | PATHOGEN RESISTANCE | 25 |
| PATHOGEN_RESISTANCE_ZM-LT-5-1 | PATHOGEN RESISTANCE | 25 |
| PATHOGEN_RESISTANCE_ZM-LT-7-1 | PATHOGEN RESISTANCE | 281 |
| PATHOGEN_RESISTANCE_ZM-LVI-4-1 | PATHOGEN RESISTANCE | 305 |
| PATHOGEN_RESISTANCE_ZM-LVI-4-1 | PATHOGEN RESISTANCE | 25 |
| PATHOGEN_RESISTANCE_ZM-LVI-4-1 | PATHOGEN RESISTANCE | 25 |
| PATHOGEN_RESISTANCE_ZM-LVI-4-1 | PATHOGEN RESISTANCE | 321 |
| PATHOGEN_RESISTANCE_ZM-LVI-5-1 | PATHOGEN RESISTANCE | 25 |
| PATHOGEN_RESISTANCE_ZM-LVI-5-1 | PATHOGEN RESISTANCE | 25 |
| PATHOGEN_RESISTANCE_ZM-LVI-6-1 | PATHOGEN RESISTANCE | 87 |
| PATHOGEN_RESISTANCE_ZM-LVI-6-1 | PATHOGEN RESISTANCE | 349 |
| PATHOGEN_RESISTANCE_ZM-LVI-6-1 | PATHOGEN RESISTANCE | 331 |
| PATHOGEN_RESISTANCE_ZM-LVI-6-1 | PATHOGEN RESISTANCE | 131 |
| PATHOGEN_RESISTANCE_ZM-LVI-6-1 | PATHOGEN RESISTANCE | 349 |
| PATHOGEN_RESISTANCE_ZM-LVI-6-1 | PATHOGEN RESISTANCE | 319 |
| PATHOGEN_RESISTANCE_ZM-MSVI-1-1 | PATHOGEN RESISTANCE | 257 |
| PATHOGEN_RESISTANCE_ZM-MSVI-1-2 | PATHOGEN RESISTANCE | 87 |
| PATHOGEN_RESISTANCE_ZM-MSVI-1-2 | PATHOGEN RESISTANCE | 217 |
| PATHOGEN_RESISTANCE_ZM-MSVI-1-2 | PATHOGEN RESISTANCE | 33 |
| PATHOGEN_RESISTANCE_ZM-MSVI-10-1 | PATHOGEN RESISTANCE | 87 |
| PATHOGEN_RESISTANCE_ZM-MSVI-10-1 | PATHOGEN RESISTANCE | 217 |
| PATHOGEN_RESISTANCE_ZM-MSVI-2-1 | PATHOGEN RESISTANCE | 87 |
| PATHOGEN_RESISTANCE_ZM-MSVI-2-1 | PATHOGEN RESISTANCE | 217 |
| PATHOGEN_RESISTANCE_ZM-MSVI-3-1 | PATHOGEN RESISTANCE | 285 |
| PATHOGEN_RESISTANCE_ZM-MSVI-3-1 | PATHOGEN RESISTANCE | 257 |
| PATHOGEN_RESISTANCE_ZM-MSVI-3-1 | PATHOGEN RESISTANCE | 285 |
| PATHOGEN_RESISTANCE_ZM-MSVI-3-2 | PATHOGEN RESISTANCE | 349 |
| PATHOGEN_RESISTANCE_ZM-MSVI-3-2 | PATHOGEN RESISTANCE | 349 |
| PATHOGEN_RESISTANCE_ZM-MSVI-3-2 | PATHOGEN RESISTANCE | 57 |
| PATHOGEN_RESISTANCE_ZM-MSVI-9-1 | PATHOGEN RESISTANCE | 285 |
| PATHOGEN_RESISTANCE_ZM-MSVI-9-1 | PATHOGEN RESISTANCE | 87 |
| PATHOGEN_RESISTANCE_ZM-MSVI-9-1 | PATHOGEN RESISTANCE | 285 |
| PATHOGEN_RESISTANCE_ZM-MSVI-9-1 | PATHOGEN RESISTANCE | 217 |
| PATHOGEN_RESISTANCE_ZM-NLBDS-1-1 | PATHOGEN RESISTANCE | 257 |
| PATHOGEN_RESISTANCE_ZM-NLBDS-10-2 | PATHOGEN RESISTANCE | 217 |
| PATHOGEN_RESISTANCE_ZM-NLBDS-3-2 | PATHOGEN RESISTANCE | 285 |
| PATHOGEN_RESISTANCE_ZM-NLBDS-3-2 | PATHOGEN RESISTANCE | 87 |
| PATHOGEN_RESISTANCE_ZM-NLBDS-3-2 | PATHOGEN RESISTANCE | 285 |
| PATHOGEN_RESISTANCE_ZM-NLBDS-3-5 | PATHOGEN RESISTANCE | 285 |
| PATHOGEN_RESISTANCE_ZM-NLBDS-3-5 | PATHOGEN RESISTANCE | 87 |
| PATHOGEN_RESISTANCE_ZM-NLBDS-3-5 | PATHOGEN RESISTANCE | 285 |
| PATHOGEN_RESISTANCE_ZM-NLBDS-4-1 | PATHOGEN RESISTANCE | 59 |
| PATHOGEN_RESISTANCE_ZM-NLBDS-4-2 | PATHOGEN RESISTANCE | 291 |
| PATHOGEN_RESISTANCE_ZM-NLBDS-4-2 | PATHOGEN RESISTANCE | 71 |
| PATHOGEN_RESISTANCE_ZM-NLBDS-4-2 | PATHOGEN RESISTANCE | 305 |
| PATHOGEN_RESISTANCE_ZM-NLBDS-4-2 | PATHOGEN RESISTANCE | 25 |
| PATHOGEN_RESISTANCE_ZM-NLBDS-4-2 | PATHOGEN RESISTANCE | 59 |
| PATHOGEN_RESISTANCE_ZM-NLBDS-4-2 | PATHOGEN RESISTANCE | 273 |
| PATHOGEN_RESISTANCE_ZM-NLBDS-4-2 | PATHOGEN RESISTANCE | 273 |
| PATHOGEN_RESISTANCE_ZM-NLBDS-4-2 | PATHOGEN RESISTANCE | 25 |
| PATHOGEN_RESISTANCE_ZM-NLBDS-4-2 | PATHOGEN RESISTANCE | 321 |
| PATHOGEN_RESISTANCE_ZM-NLBDS-4-2 | PATHOGEN RESISTANCE | 57 |
| PATHOGEN_RESISTANCE_ZM-NLBDS-4-2 | PATHOGEN RESISTANCE | 273 |
| PATHOGEN_RESISTANCE_ZM-NLBDS-4-2 | PATHOGEN RESISTANCE | 33 |
| PATHOGEN_RESISTANCE_ZM-NLBDS-5-1 | PATHOGEN RESISTANCE | 25 |
| PATHOGEN_RESISTANCE_ZM-NLBDS-5-1 | PATHOGEN RESISTANCE | 25 |
| PATHOGEN_RESISTANCE_ZM-NLBDS-5-2 | PATHOGEN RESISTANCE | 25 |
| PATHOGEN_RESISTANCE_ZM-NLBDS-5-2 | PATHOGEN RESISTANCE | 25 |
| PATHOGEN_RESISTANCE_ZM-NLBDS-5-3 | PATHOGEN RESISTANCE | 305 |
| PATHOGEN_RESISTANCE_ZM-NLBDS-5-3 | PATHOGEN RESISTANCE | 321 |
| PATHOGEN_RESISTANCE_ZM-NLBDS-5-5 | PATHOGEN RESISTANCE | 291 |
| PATHOGEN_RESISTANCE_ZM-NLBDS-6-1 | PATHOGEN RESISTANCE | 285 |
| PATHOGEN_RESISTANCE_ZM-NLBDS-6-1 | PATHOGEN RESISTANCE | 349 |
| PATHOGEN_RESISTANCE_ZM-NLBDS-6-1 | PATHOGEN RESISTANCE | 263 |
| PATHOGEN_RESISTANCE_ZM-NLBDS-6-1 | PATHOGEN RESISTANCE | 131 |
| PATHOGEN_RESISTANCE_ZM-NLBDS-6-1 | PATHOGEN RESISTANCE | 257 |
| PATHOGEN_RESISTANCE_ZM-NLBDS-6-1 | PATHOGEN RESISTANCE | 263 |
| PATHOGEN_RESISTANCE_ZM-NLBDS-6-1 | PATHOGEN RESISTANCE | 349 |
| PATHOGEN_RESISTANCE_ZM-NLBDS-6-1 | PATHOGEN RESISTANCE | 285 |
| PATHOGEN_RESISTANCE_ZM-NLBDS-6-1 | PATHOGEN RESISTANCE | 263 |
| PATHOGEN_RESISTANCE_ZM-NLBDS-6-1 | PATHOGEN RESISTANCE | 237 |
| PATHOGEN_RESISTANCE_ZM-NLBDS-8-1 | PATHOGEN RESISTANCE | 263 |
| PATHOGEN_RESISTANCE_ZM-NLBDS-8-1 | PATHOGEN RESISTANCE | 263 |
| PATHOGEN_RESISTANCE_ZM-NLBDS-8-1 | PATHOGEN RESISTANCE | 263 |
| PATHOGEN_RESISTANCE_ZM-NLBDS-8-2 | PATHOGEN RESISTANCE | 71 |
| PATHOGEN_RESISTANCE_ZM-NLBDS-8-2 | PATHOGEN RESISTANCE | 305 |
| PATHOGEN_RESISTANCE_ZM-NLBDS-8-2 | PATHOGEN RESISTANCE | 349 |
| PATHOGEN_RESISTANCE_ZM-NLBDS-8-2 | PATHOGEN RESISTANCE | 349 |
| PATHOGEN_RESISTANCE_ZM-NLBDS-8-2 | PATHOGEN RESISTANCE | 321 |
| PATHOGEN_RESISTANCE_ZM-NLBDS-9-1 | PATHOGEN RESISTANCE | 309 |
| PATHOGEN_RESISTANCE_ZM-NLBDS-9-1 | PATHOGEN RESISTANCE | 131 |
| PATHOGEN_RESISTANCE_ZM-NLBDS-9-1 | PATHOGEN RESISTANCE | 257 |
| PATHOGEN_RESISTANCE_ZM-NLBDS-9-1 | PATHOGEN RESISTANCE | 319 |
| PATHOGEN_RESISTANCE_ZM-NLBDS-9-2 | PATHOGEN RESISTANCE | 285 |
| PATHOGEN_RESISTANCE_ZM-NLBDS-9-2 | PATHOGEN RESISTANCE | 87 |
| PATHOGEN_RESISTANCE_ZM-NLBDS-9-2 | PATHOGEN RESISTANCE | 331 |
| PATHOGEN_RESISTANCE_ZM-NLBDS-9-2 | PATHOGEN RESISTANCE | 57 |
| PATHOGEN_RESISTANCE_ZM-NLBDS-9-2 | PATHOGEN RESISTANCE | 285 |
| PATHOGEN_RESISTANCE_ZM-NLBDS-9-2 | PATHOGEN RESISTANCE | 217 |
| PATHOGEN_RESISTANCE_ZM-NLBDS-9-2 | PATHOGEN RESISTANCE | 319 |
| PATHOGEN_RESISTANCE_ZM-NLBIP-3-1 | PATHOGEN RESISTANCE | 285 |
| PATHOGEN_RESISTANCE_ZM-NLBIP-3-1 | PATHOGEN RESISTANCE | 87 |
| PATHOGEN_RESISTANCE_ZM-NLBIP-3-1 | PATHOGEN RESISTANCE | 285 |
| PATHOGEN_RESISTANCE_ZM-NLBIP-4-1 | PATHOGEN RESISTANCE | 291 |
| PATHOGEN_RESISTANCE_ZM-NLBIP-4-1 | PATHOGEN RESISTANCE | 71 |
| PATHOGEN_RESISTANCE_ZM-NLBIP-4-1 | PATHOGEN RESISTANCE | 25 |
| PATHOGEN_RESISTANCE_ZM-NLBIP-4-1 | PATHOGEN RESISTANCE | 273 |
| PATHOGEN_RESISTANCE_ZM-NLBIP-4-1 | PATHOGEN RESISTANCE | 273 |
| PATHOGEN_RESISTANCE_ZM-NLBIP-4-1 | PATHOGEN RESISTANCE | 25 |
| PATHOGEN_RESISTANCE_ZM-NLBIP-4-1 | PATHOGEN RESISTANCE | 57 |
| PATHOGEN_RESISTANCE_ZM-NLBIP-4-1 | PATHOGEN RESISTANCE | 273 |
| PATHOGEN_RESISTANCE_ZM-NLBIP-4-1 | PATHOGEN RESISTANCE | 33 |
| PATHOGEN_RESISTANCE_ZM-NLBIP-5-1 | PATHOGEN RESISTANCE | 25 |
| PATHOGEN_RESISTANCE_ZM-NLBIP-5-1 | PATHOGEN RESISTANCE | 25 |
| PATHOGEN_RESISTANCE_ZM-NLBIP-8-1 | PATHOGEN RESISTANCE | 263 |
| PATHOGEN_RESISTANCE_ZM-NLBIP-8-1 | PATHOGEN RESISTANCE | 263 |
| PATHOGEN_RESISTANCE_ZM-NLBIP-8-1 | PATHOGEN RESISTANCE | 263 |
| PATHOGEN_RESISTANCE_ZM-NLBIP-9-1 | PATHOGEN RESISTANCE | 309 |
| PATHOGEN_RESISTANCE_ZM-NLBIP-9-1 | PATHOGEN RESISTANCE | 131 |
| PATHOGEN_RESISTANCE_ZM-NLBIP-9-1 | PATHOGEN RESISTANCE | 257 |
| PATHOGEN_RESISTANCE_ZM-NLBIP-9-1 | PATHOGEN RESISTANCE | 319 |
| PATHOGEN_RESISTANCE_ZM-PCSI-1-1 | PATHOGEN RESISTANCE | 71 |
| PATHOGEN_RESISTANCE_ZM-PCSI-1-1 | PATHOGEN RESISTANCE | 217 |
| PATHOGEN_RESISTANCE_ZM-PCSI-1-1 | PATHOGEN RESISTANCE | 319 |
| PATHOGEN_RESISTANCE_ZM-PCSI-1-2 | PATHOGEN RESISTANCE | 257 |
| PATHOGEN_RESISTANCE_ZM-PCSI-1-4 | PATHOGEN RESISTANCE | 285 |
| PATHOGEN_RESISTANCE_ZM-PCSI-1-4 | PATHOGEN RESISTANCE | 87 |
| PATHOGEN_RESISTANCE_ZM-PCSI-1-4 | PATHOGEN RESISTANCE | 285 |
| PATHOGEN_RESISTANCE_ZM-PCSI-1-4 | PATHOGEN RESISTANCE | 217 |
| PATHOGEN_RESISTANCE_ZM-PCSI-1-5 | PATHOGEN RESISTANCE | 319 |
| PATHOGEN_RESISTANCE_ZM-PCSI-1-6 | PATHOGEN RESISTANCE | 285 |
| PATHOGEN_RESISTANCE_ZM-PCSI-1-6 | PATHOGEN RESISTANCE | 87 |
| PATHOGEN_RESISTANCE_ZM-PCSI-1-6 | PATHOGEN RESISTANCE | 285 |
| PATHOGEN_RESISTANCE_ZM-PCSI-1-6 | PATHOGEN RESISTANCE | 217 |
| PATHOGEN_RESISTANCE_ZM-PCSI-1-7 | PATHOGEN RESISTANCE | 257 |
| PATHOGEN_RESISTANCE_ZM-PCSI-2-1 | PATHOGEN RESISTANCE | 291 |
| PATHOGEN_RESISTANCE_ZM-PCSI-2-1 | PATHOGEN RESISTANCE | 87 |
| PATHOGEN_RESISTANCE_ZM-PCSI-2-4 | PATHOGEN RESISTANCE | 285 |
| PATHOGEN_RESISTANCE_ZM-PCSI-2-4 | PATHOGEN RESISTANCE | 359 |
| PATHOGEN_RESISTANCE_ZM-PCSI-2-4 | PATHOGEN RESISTANCE | 233 |
| PATHOGEN_RESISTANCE_ZM-PCSI-2-4 | PATHOGEN RESISTANCE | 359 |
| PATHOGEN_RESISTANCE_ZM-PCSI-2-4 | PATHOGEN RESISTANCE | 233 |
| PATHOGEN_RESISTANCE_ZM-PCSI-2-4 | PATHOGEN RESISTANCE | 281 |
| PATHOGEN_RESISTANCE_ZM-PCSI-2-4 | PATHOGEN RESISTANCE | 233 |
| PATHOGEN_RESISTANCE_ZM-PCSI-2-4 | PATHOGEN RESISTANCE | 285 |
| PATHOGEN_RESISTANCE_ZM-PCSI-2-4 | PATHOGEN RESISTANCE | 233 |
| PATHOGEN_RESISTANCE_ZM-PCSI-2-4 | PATHOGEN RESISTANCE | 33 |
| PATHOGEN_RESISTANCE_ZM-PCSI-2-5 | PATHOGEN RESISTANCE | 291 |
| PATHOGEN_RESISTANCE_ZM-PCSI-2-5 | PATHOGEN RESISTANCE | 87 |
| PATHOGEN_RESISTANCE_ZM-PCSI-3-1 | PATHOGEN RESISTANCE | 285 |
| PATHOGEN_RESISTANCE_ZM-PCSI-3-1 | PATHOGEN RESISTANCE | 349 |
| PATHOGEN_RESISTANCE_ZM-PCSI-3-1 | PATHOGEN RESISTANCE | 349 |
| PATHOGEN_RESISTANCE_ZM-PCSI-3-1 | PATHOGEN RESISTANCE | 57 |
| PATHOGEN_RESISTANCE_ZM-PCSI-3-1 | PATHOGEN RESISTANCE | 285 |
| PATHOGEN_RESISTANCE_ZM-PCSI-3-2 | PATHOGEN RESISTANCE | 285 |
| PATHOGEN_RESISTANCE_ZM-PCSI-3-2 | PATHOGEN RESISTANCE | 87 |
| PATHOGEN_RESISTANCE_ZM-PCSI-3-2 | PATHOGEN RESISTANCE | 285 |
| PATHOGEN_RESISTANCE_ZM-PCSI-3-3 | PATHOGEN RESISTANCE | 285 |
| PATHOGEN_RESISTANCE_ZM-PCSI-3-3 | PATHOGEN RESISTANCE | 285 |
| PATHOGEN_RESISTANCE_ZM-PCSI-3-4 | PATHOGEN RESISTANCE | 285 |
| PATHOGEN_RESISTANCE_ZM-PCSI-3-4 | PATHOGEN RESISTANCE | 87 |
| PATHOGEN_RESISTANCE_ZM-PCSI-3-4 | PATHOGEN RESISTANCE | 257 |
| PATHOGEN_RESISTANCE_ZM-PCSI-3-4 | PATHOGEN RESISTANCE | 285 |
| PATHOGEN_RESISTANCE_ZM-PCSI-3-5 | PATHOGEN RESISTANCE | 285 |
| PATHOGEN_RESISTANCE_ZM-PCSI-3-5 | PATHOGEN RESISTANCE | 87 |
| PATHOGEN_RESISTANCE_ZM-PCSI-3-5 | PATHOGEN RESISTANCE | 285 |
| PATHOGEN_RESISTANCE_ZM-PCSI-3-6 | PATHOGEN RESISTANCE | 285 |
| PATHOGEN_RESISTANCE_ZM-PCSI-3-6 | PATHOGEN RESISTANCE | 349 |
| PATHOGEN_RESISTANCE_ZM-PCSI-3-6 | PATHOGEN RESISTANCE | 349 |
| PATHOGEN_RESISTANCE_ZM-PCSI-3-6 | PATHOGEN RESISTANCE | 57 |
| PATHOGEN_RESISTANCE_ZM-PCSI-3-6 | PATHOGEN RESISTANCE | 285 |
| PATHOGEN_RESISTANCE_ZM-PCSI-4-1 | PATHOGEN RESISTANCE | 59 |
| PATHOGEN_RESISTANCE_ZM-PCSI-4-2 | PATHOGEN RESISTANCE | 291 |
| PATHOGEN_RESISTANCE_ZM-PCSI-4-2 | PATHOGEN RESISTANCE | 71 |
| PATHOGEN_RESISTANCE_ZM-PCSI-4-2 | PATHOGEN RESISTANCE | 25 |
| PATHOGEN_RESISTANCE_ZM-PCSI-4-2 | PATHOGEN RESISTANCE | 59 |
| PATHOGEN_RESISTANCE_ZM-PCSI-4-2 | PATHOGEN RESISTANCE | 273 |
| PATHOGEN_RESISTANCE_ZM-PCSI-4-2 | PATHOGEN RESISTANCE | 273 |
| PATHOGEN_RESISTANCE_ZM-PCSI-4-2 | PATHOGEN RESISTANCE | 25 |
| PATHOGEN_RESISTANCE_ZM-PCSI-4-2 | PATHOGEN RESISTANCE | 57 |
| PATHOGEN_RESISTANCE_ZM-PCSI-4-2 | PATHOGEN RESISTANCE | 273 |
| PATHOGEN_RESISTANCE_ZM-PCSI-4-2 | PATHOGEN RESISTANCE | 33 |
| PATHOGEN_RESISTANCE_ZM-PCSI-4-3 | PATHOGEN RESISTANCE | 99 |
| PATHOGEN_RESISTANCE_ZM-PCSI-4-3 | PATHOGEN RESISTANCE | 131 |
| PATHOGEN_RESISTANCE_ZM-PCSI-4-5 | PATHOGEN RESISTANCE | 99 |
| PATHOGEN_RESISTANCE_ZM-PCSI-4-5 | PATHOGEN RESISTANCE | 131 |
| PATHOGEN_RESISTANCE_ZM-PCSI-4-6 | PATHOGEN RESISTANCE | 305 |
| PATHOGEN_RESISTANCE_ZM-PCSI-4-6 | PATHOGEN RESISTANCE | 25 |
| PATHOGEN_RESISTANCE_ZM-PCSI-4-6 | PATHOGEN RESISTANCE | 25 |
| PATHOGEN_RESISTANCE_ZM-PCSI-4-6 | PATHOGEN RESISTANCE | 321 |
| PATHOGEN_RESISTANCE_ZM-PCSI-5-1 | PATHOGEN RESISTANCE | 263 |
| PATHOGEN_RESISTANCE_ZM-PCSI-5-1 | PATHOGEN RESISTANCE | 331 |
| PATHOGEN_RESISTANCE_ZM-PCSI-5-1 | PATHOGEN RESISTANCE | 263 |
| PATHOGEN_RESISTANCE_ZM-PCSI-5-1 | PATHOGEN RESISTANCE | 263 |
| PATHOGEN_RESISTANCE_ZM-PCSI-5-2 | PATHOGEN RESISTANCE | 263 |
| PATHOGEN_RESISTANCE_ZM-PCSI-5-2 | PATHOGEN RESISTANCE | 331 |
| PATHOGEN_RESISTANCE_ZM-PCSI-5-2 | PATHOGEN RESISTANCE | 263 |
| PATHOGEN_RESISTANCE_ZM-PCSI-5-2 | PATHOGEN RESISTANCE | 263 |
| PATHOGEN_RESISTANCE_ZM-PCSI-5-3 | PATHOGEN RESISTANCE | 263 |
| PATHOGEN_RESISTANCE_ZM-PCSI-5-3 | PATHOGEN RESISTANCE | 331 |
| PATHOGEN_RESISTANCE_ZM-PCSI-5-3 | PATHOGEN RESISTANCE | 263 |
| PATHOGEN_RESISTANCE_ZM-PCSI-5-3 | PATHOGEN RESISTANCE | 263 |
| PATHOGEN_RESISTANCE_ZM-PCSI-5-5 | PATHOGEN RESISTANCE | 263 |
| PATHOGEN_RESISTANCE_ZM-PCSI-5-5 | PATHOGEN RESISTANCE | 331 |
| PATHOGEN_RESISTANCE_ZM-PCSI-5-5 | PATHOGEN RESISTANCE | 263 |
| PATHOGEN_RESISTANCE_ZM-PCSI-5-5 | PATHOGEN RESISTANCE | 263 |
| PATHOGEN_RESISTANCE_ZM-PCSI-5-7 | PATHOGEN RESISTANCE | 25 |
| PATHOGEN_RESISTANCE_ZM-PCSI-5-7 | PATHOGEN RESISTANCE | 25 |
| PATHOGEN_RESISTANCE_ZM-PCSI-6-1 | PATHOGEN RESISTANCE | 263 |
| PATHOGEN_RESISTANCE_ZM-PCSI-6-1 | PATHOGEN RESISTANCE | 257 |
| PATHOGEN_RESISTANCE_ZM-PCSI-6-1 | PATHOGEN RESISTANCE | 263 |
| PATHOGEN_RESISTANCE_ZM-PCSI-6-1 | PATHOGEN RESISTANCE | 263 |
| PATHOGEN_RESISTANCE_ZM-PCSI-7-1 | PATHOGEN RESISTANCE | 281 |
| PATHOGEN_RESISTANCE_ZM-PCSI-7-2 | PATHOGEN RESISTANCE | 281 |
| PATHOGEN_RESISTANCE_ZM-PCSI-7-3 | PATHOGEN RESISTANCE | 281 |
| PATHOGEN_RESISTANCE_ZM-PCSI-9-1 | PATHOGEN RESISTANCE | 285 |
| PATHOGEN_RESISTANCE_ZM-PCSI-9-1 | PATHOGEN RESISTANCE | 87 |
| PATHOGEN_RESISTANCE_ZM-PCSI-9-1 | PATHOGEN RESISTANCE | 285 |
| PATHOGEN_RESISTANCE_ZM-PCSI-9-1 | PATHOGEN RESISTANCE | 217 |
| PATHOGEN_RESISTANCE_ZM-PCSI-9-2 | PATHOGEN RESISTANCE | 309 |
| PATHOGEN_RESISTANCE_ZM-PCSI-9-2 | PATHOGEN RESISTANCE | 131 |
| PATHOGEN_RESISTANCE_ZM-PCSI-9-2 | PATHOGEN RESISTANCE | 257 |
| PATHOGEN_RESISTANCE_ZM-PCSI-9-2 | PATHOGEN RESISTANCE | 319 |
| PATHOGEN_RESISTANCE_ZM-PCSI-9-3 | PATHOGEN RESISTANCE | 309 |
| PATHOGEN_RESISTANCE_ZM-PCSI-9-3 | PATHOGEN RESISTANCE | 131 |
| PATHOGEN_RESISTANCE_ZM-PCSI-9-3 | PATHOGEN RESISTANCE | 257 |
| PATHOGEN_RESISTANCE_ZM-PCSI-9-3 | PATHOGEN RESISTANCE | 319 |
| PATHOGEN_RESISTANCE_ZM-PHSI-4-1 | PATHOGEN RESISTANCE | 305 |
| PATHOGEN_RESISTANCE_ZM-PHSI-4-1 | PATHOGEN RESISTANCE | 25 |
| PATHOGEN_RESISTANCE_ZM-PHSI-4-1 | PATHOGEN RESISTANCE | 25 |
| PATHOGEN_RESISTANCE_ZM-PHSI-4-1 | PATHOGEN RESISTANCE | 321 |
| PATHOGEN_RESISTANCE_ZM-PHSI-5-1 | PATHOGEN RESISTANCE | 291 |
| PATHOGEN_RESISTANCE_ZM-PHSI-6-1 | PATHOGEN RESISTANCE | 263 |
| PATHOGEN_RESISTANCE_ZM-PHSI-6-1 | PATHOGEN RESISTANCE | 257 |
| PATHOGEN_RESISTANCE_ZM-PHSI-6-1 | PATHOGEN RESISTANCE | 263 |
| PATHOGEN_RESISTANCE_ZM-PHSI-6-1 | PATHOGEN RESISTANCE | 263 |
| PATHOGEN_RESISTANCE_ZM-PHSI-6-2 | PATHOGEN RESISTANCE | 87 |
| PATHOGEN_RESISTANCE_ZM-PHSI-6-2 | PATHOGEN RESISTANCE | 349 |
| PATHOGEN_RESISTANCE_ZM-PHSI-6-2 | PATHOGEN RESISTANCE | 331 |
| PATHOGEN_RESISTANCE_ZM-PHSI-6-2 | PATHOGEN RESISTANCE | 131 |
| PATHOGEN_RESISTANCE_ZM-PHSI-6-2 | PATHOGEN RESISTANCE | 349 |
| PATHOGEN_RESISTANCE_ZM-PHSI-6-2 | PATHOGEN RESISTANCE | 319 |
| PATHOGEN_RESISTANCE_ZM-PHSI-6-3 | PATHOGEN RESISTANCE | 285 |
| PATHOGEN_RESISTANCE_ZM-PHSI-6-3 | PATHOGEN RESISTANCE | 263 |
| PATHOGEN_RESISTANCE_ZM-PHSI-6-3 | PATHOGEN RESISTANCE | 131 |
| PATHOGEN_RESISTANCE_ZM-PHSI-6-3 | PATHOGEN RESISTANCE | 263 |
| PATHOGEN_RESISTANCE_ZM-PHSI-6-3 | PATHOGEN RESISTANCE | 285 |
| PATHOGEN_RESISTANCE_ZM-PHSI-6-3 | PATHOGEN RESISTANCE | 263 |
| PATHOGEN_RESISTANCE_ZM-PHSI-8-1 | PATHOGEN RESISTANCE | 71 |
| PATHOGEN_RESISTANCE_ZM-PHSI-8-1 | PATHOGEN RESISTANCE | 305 |
| PATHOGEN_RESISTANCE_ZM-PHSI-8-1 | PATHOGEN RESISTANCE | 349 |
| PATHOGEN_RESISTANCE_ZM-PHSI-8-1 | PATHOGEN RESISTANCE | 349 |
| PATHOGEN_RESISTANCE_ZM-PHSI-8-1 | PATHOGEN RESISTANCE | 321 |
| PATHOGEN_RESISTANCE_ZM-PHSI-9-1 | PATHOGEN RESISTANCE | 319 |
| PATHOGEN_RESISTANCE_ZM-SCBR-1-1 | PATHOGEN RESISTANCE | 319 |
| PATHOGEN_RESISTANCE_ZM-SCBR-1-2 | PATHOGEN RESISTANCE | 257 |
| PATHOGEN_RESISTANCE_ZM-SCBR-5-1 | PATHOGEN RESISTANCE | 25 |
| PATHOGEN_RESISTANCE_ZM-SCBR-5-1 | PATHOGEN RESISTANCE | 25 |
| PATHOGEN_RESISTANCE_ZM-SCBR-7-1 | PATHOGEN RESISTANCE | 281 |
| PATHOGEN_RESISTANCE_ZM-SCBR-8-1 | PATHOGEN RESISTANCE | 263 |
| PATHOGEN_RESISTANCE_ZM-SCBR-8-1 | PATHOGEN RESISTANCE | 263 |
| PATHOGEN_RESISTANCE_ZM-SCBR-8-1 | PATHOGEN RESISTANCE | 263 |
| PATHOGEN_RESISTANCE_ZM-SCBR-9-1 | PATHOGEN RESISTANCE | 319 |
| PATHOGEN_RESISTANCE_ZM-SWCBR-1-1 | PATHOGEN RESISTANCE | 257 |
| PATHOGEN_RESISTANCE_ZM-SWCBR-1-2 | PATHOGEN RESISTANCE | 71 |
| PATHOGEN_RESISTANCE_ZM-SWCBR-1-2 | PATHOGEN RESISTANCE | 217 |
| PATHOGEN_RESISTANCE_ZM-SWCBR-1-2 | PATHOGEN RESISTANCE | 319 |
| PATHOGEN_RESISTANCE_ZM-SWCBR-1-3 | PATHOGEN RESISTANCE | 319 |
| PATHOGEN_RESISTANCE_ZM-SWCBR-1-4 | PATHOGEN RESISTANCE | 257 |
| PATHOGEN_RESISTANCE_ZM-SWCBR-1-5 | PATHOGEN RESISTANCE | 71 |
| PATHOGEN_RESISTANCE_ZM-SWCBR-1-5 | PATHOGEN RESISTANCE | 217 |
| PATHOGEN_RESISTANCE_ZM-SWCBR-1-6 | PATHOGEN RESISTANCE | 319 |
| PATHOGEN_RESISTANCE_ZM-SWCBR-3-1 | PATHOGEN RESISTANCE | 285 |
| PATHOGEN_RESISTANCE_ZM-SWCBR-3-1 | PATHOGEN RESISTANCE | 257 |
| PATHOGEN_RESISTANCE_ZM-SWCBR-3-1 | PATHOGEN RESISTANCE | 285 |
| PATHOGEN_RESISTANCE_ZM-SWCBR-3-2 | PATHOGEN RESISTANCE | 285 |
| PATHOGEN_RESISTANCE_ZM-SWCBR-3-2 | PATHOGEN RESISTANCE | 257 |
| PATHOGEN_RESISTANCE_ZM-SWCBR-3-2 | PATHOGEN RESISTANCE | 285 |
| PATHOGEN_RESISTANCE_ZM-SWCBR-5-1 | PATHOGEN RESISTANCE | 291 |
| PATHOGEN_RESISTANCE_ZM-SWCBR-5-1 | PATHOGEN RESISTANCE | 25 |
| PATHOGEN_RESISTANCE_ZM-SWCBR-5-1 | PATHOGEN RESISTANCE | 25 |
| PATHOGEN_RESISTANCE_ZM-SWCBR-5-2 | PATHOGEN RESISTANCE | 25 |
| PATHOGEN_RESISTANCE_ZM-SWCBR-5-2 | PATHOGEN RESISTANCE | 25 |
| PATHOGEN_RESISTANCE_ZM-SWCBR-5-3 | PATHOGEN RESISTANCE | 25 |
| PATHOGEN_RESISTANCE_ZM-SWCBR-5-3 | PATHOGEN RESISTANCE | 25 |
| PATHOGEN_RESISTANCE_ZM-SWCBR-6-1 | PATHOGEN RESISTANCE | 87 |
| PATHOGEN_RESISTANCE_ZM-SWCBR-6-1 | PATHOGEN RESISTANCE | 349 |
| PATHOGEN_RESISTANCE_ZM-SWCBR-6-1 | PATHOGEN RESISTANCE | 331 |
| PATHOGEN_RESISTANCE_ZM-SWCBR-6-1 | PATHOGEN RESISTANCE | 131 |
| PATHOGEN_RESISTANCE_ZM-SWCBR-6-1 | PATHOGEN RESISTANCE | 349 |
| PATHOGEN_RESISTANCE_ZM-SWCBR-6-1 | PATHOGEN RESISTANCE | 319 |
| PATHOGEN_RESISTANCE_ZM-SWCBR-6-2 | PATHOGEN RESISTANCE | 285 |
| PATHOGEN_RESISTANCE_ZM-SWCBR-6-2 | PATHOGEN RESISTANCE | 349 |
| PATHOGEN_RESISTANCE_ZM-SWCBR-6-2 | PATHOGEN RESISTANCE | 263 |
| PATHOGEN_RESISTANCE_ZM-SWCBR-6-2 | PATHOGEN RESISTANCE | 131 |
| PATHOGEN_RESISTANCE_ZM-SWCBR-6-2 | PATHOGEN RESISTANCE | 263 |
| PATHOGEN_RESISTANCE_ZM-SWCBR-6-2 | PATHOGEN RESISTANCE | 349 |
| PATHOGEN_RESISTANCE_ZM-SWCBR-6-2 | PATHOGEN RESISTANCE | 285 |
| PATHOGEN_RESISTANCE_ZM-SWCBR-6-2 | PATHOGEN RESISTANCE | 263 |
| PATHOGEN_RESISTANCE_ZM-SWCBR-6-2 | PATHOGEN RESISTANCE | 237 |
| PATHOGEN_RESISTANCE_ZM-SWCBR-6-3 | PATHOGEN RESISTANCE | 285 |
| PATHOGEN_RESISTANCE_ZM-SWCBR-6-3 | PATHOGEN RESISTANCE | 263 |
| PATHOGEN_RESISTANCE_ZM-SWCBR-6-3 | PATHOGEN RESISTANCE | 131 |
| PATHOGEN_RESISTANCE_ZM-SWCBR-6-3 | PATHOGEN RESISTANCE | 263 |
| PATHOGEN_RESISTANCE_ZM-SWCBR-6-3 | PATHOGEN RESISTANCE | 285 |
| PATHOGEN_RESISTANCE_ZM-SWCBR-6-3 | PATHOGEN RESISTANCE | 263 |
| PATHOGEN_RESISTANCE_ZM-SWCBR-7-1 | PATHOGEN RESISTANCE | 281 |
| PATHOGEN_RESISTANCE_ZM-SWCBR-7-2 | PATHOGEN RESISTANCE | 281 |
| PATHOGEN_RESISTANCE_ZM-SWCBR-7-3 | PATHOGEN RESISTANCE | 281 |
| PATHOGEN_RESISTANCE_ZM-SWCBR-8-1 | PATHOGEN RESISTANCE | 71 |
| PATHOGEN_RESISTANCE_ZM-SWCBR-8-1 | PATHOGEN RESISTANCE | 305 |
| PATHOGEN_RESISTANCE_ZM-SWCBR-8-1 | PATHOGEN RESISTANCE | 349 |
| PATHOGEN_RESISTANCE_ZM-SWCBR-8-1 | PATHOGEN RESISTANCE | 349 |
| PATHOGEN_RESISTANCE_ZM-SWCBR-8-1 | PATHOGEN RESISTANCE | 321 |
| PATHOGEN_RESISTANCE_ZM-SWCBR-8-2 | PATHOGEN RESISTANCE | 263 |
| PATHOGEN_RESISTANCE_ZM-SWCBR-8-2 | PATHOGEN RESISTANCE | 263 |
| PATHOGEN_RESISTANCE_ZM-SWCBR-8-2 | PATHOGEN RESISTANCE | 263 |
| PATHOGEN_RESISTANCE_ZM-SWCBR-9-1 | PATHOGEN RESISTANCE | 309 |
| PATHOGEN_RESISTANCE_ZM-SWCBR-9-1 | PATHOGEN RESISTANCE | 131 |
| PATHOGEN_RESISTANCE_ZM-SWCBR-9-1 | PATHOGEN RESISTANCE | 257 |
| PATHOGEN_RESISTANCE_ZM-SWCBR-9-1 | PATHOGEN RESISTANCE | 319 |
| PATHOGEN_RESISTANCE_ZM-SWCBR-9-2 | PATHOGEN RESISTANCE | 285 |
| PATHOGEN_RESISTANCE_ZM-SWCBR-9-2 | PATHOGEN RESISTANCE | 87 |
| PATHOGEN_RESISTANCE_ZM-SWCBR-9-2 | PATHOGEN RESISTANCE | 331 |
| PATHOGEN_RESISTANCE_ZM-SWCBR-9-2 | PATHOGEN RESISTANCE | 57 |
| PATHOGEN_RESISTANCE_ZM-SWCBR-9-2 | PATHOGEN RESISTANCE | 285 |
| PATHOGEN_RESISTANCE_ZM-SWCBR-9-2 | PATHOGEN RESISTANCE | 217 |
| PATHOGEN_RESISTANCE_ZM-SWCBR-9-2 | PATHOGEN RESISTANCE | 319 |
| PATHOGEN_RESISTANCE_ZM-SWCBR-9-3 | PATHOGEN RESISTANCE | 309 |
| PATHOGEN_RESISTANCE_ZM-SWCBR-9-3 | PATHOGEN RESISTANCE | 257 |
| PATHOGEN_RESISTANCE_ZM-SWCBR-9-3 | PATHOGEN RESISTANCE | 319 |
| PATHOGEN_RESISTANCE_ZM-SWCBR-9-4 | PATHOGEN RESISTANCE | 309 |
| PATHOGEN_RESISTANCE_ZM-SWCBR-9-4 | PATHOGEN RESISTANCE | 131 |
| PATHOGEN_RESISTANCE_ZM-SWCBR-9-4 | PATHOGEN RESISTANCE | 257 |
| PATHOGEN_RESISTANCE_ZM-SWCBR-9-4 | PATHOGEN RESISTANCE | 319 |
| QUALITY_ZM-CPC-1-2 | GRAIN_QUALITY | 319 |
| QUALITY_ZM-CPC-1-3 | GRAIN_QUALITY | 257 |
| QUALITY_ZM-CPC-1-4 | GRAIN_QUALITY | 285 |
| QUALITY_ZM-CPC-1-4 | GRAIN_QUALITY | 87 |
| QUALITY_ZM-CPC-1-4 | GRAIN_QUALITY | 87 |
| QUALITY_ZM-CPC-1-4 | GRAIN_QUALITY | 285 |
| QUALITY_ZM-CPC-1-4 | GRAIN_QUALITY | 217 |
| QUALITY_ZM-CPC-1-5 | GRAIN_QUALITY | 257 |
| QUALITY_ZM-CPC-1-6 | GRAIN_QUALITY | 285 |
| QUALITY_ZM-CPC-1-6 | GRAIN_QUALITY | 87 |
| QUALITY_ZM-CPC-1-6 | GRAIN_QUALITY | 87 |
| QUALITY_ZM-CPC-1-6 | GRAIN_QUALITY | 285 |
| QUALITY_ZM-CPC-1-6 | GRAIN_QUALITY | 217 |
| QUALITY_ZM-CPC-10-1 | GRAIN_QUALITY | 217 |
| QUALITY_ZM-CPC-3-1 | GRAIN_QUALITY | 349 |
| QUALITY_ZM-CPC-3-1 | GRAIN_QUALITY | 349 |
| QUALITY_ZM-CPC-3-1 | GRAIN_QUALITY | 57 |
| QUALITY_ZM-CPC-3-2 | GRAIN_QUALITY | 285 |
| QUALITY_ZM-CPC-3-2 | GRAIN_QUALITY | 87 |
| QUALITY_ZM-CPC-3-2 | GRAIN_QUALITY | 87 |
| QUALITY_ZM-CPC-3-2 | GRAIN_QUALITY | 285 |
| QUALITY_ZM-CPC-3-3 | GRAIN_QUALITY | 349 |
| QUALITY_ZM-CPC-3-3 | GRAIN_QUALITY | 349 |
| QUALITY_ZM-CPC-3-3 | GRAIN_QUALITY | 57 |
| QUALITY_ZM-CPC-6-1 | GRAIN_QUALITY | 131 |
| QUALITY_ZM-CPC-6-1 | GRAIN_QUALITY | 349 |
| QUALITY_ZM-CPC-6-1 | GRAIN_QUALITY | 197 |
| QUALITY_ZM-CPC-6-1 | GRAIN_QUALITY | 131 |
| QUALITY_ZM-CPC-6-1 | GRAIN_QUALITY | 349 |
| QUALITY_ZM-CPC-6-2 | GRAIN_QUALITY | 131 |
| QUALITY_ZM-CPC-6-2 | GRAIN_QUALITY | 87 |
| QUALITY_ZM-CPC-6-2 | GRAIN_QUALITY | 349 |
| QUALITY_ZM-CPC-6-2 | GRAIN_QUALITY | 197 |
| QUALITY_ZM-CPC-6-2 | GRAIN_QUALITY | 331 |
| QUALITY_ZM-CPC-6-2 | GRAIN_QUALITY | 131 |
| QUALITY_ZM-CPC-6-2 | GRAIN_QUALITY | 349 |
| QUALITY_ZM-CPC-6-2 | GRAIN_QUALITY | 331 |
| QUALITY_ZM-CPC-6-2 | GRAIN_QUALITY | 87 |
| QUALITY_ZM-CPC-6-2 | GRAIN_QUALITY | 319 |
| QUALITY_ZM-CPC-7-1 | GRAIN_QUALITY | 281 |
| QUALITY_ZM-CPC-7-2 | GRAIN_QUALITY | 87 |
| QUALITY_ZM-CPC-7-2 | GRAIN_QUALITY | 87 |
| QUALITY_ZM-CPC-7-3 | GRAIN_QUALITY | 281 |
| QUALITY_ZM-IVDOM-1-1 | GRAIN_QUALITY | 319 |
| QUALITY_ZM-IVDOM-1-2 | GRAIN_QUALITY | 257 |
| QUALITY_ZM-IVDOM-1-4 | GRAIN_QUALITY | 257 |
| QUALITY_ZM-IVDOM-10-1 | GRAIN_QUALITY | 217 |
| QUALITY_ZM-IVDOM-10-2 | GRAIN_QUALITY | 217 |
| QUALITY_ZM-IVDOM-3-1 | GRAIN_QUALITY | 349 |
| QUALITY_ZM-IVDOM-3-1 | GRAIN_QUALITY | 349 |
| QUALITY_ZM-IVDOM-3-1 | GRAIN_QUALITY | 57 |
| QUALITY_ZM-IVDOM-3-3 | GRAIN_QUALITY | 349 |
| QUALITY_ZM-IVDOM-3-3 | GRAIN_QUALITY | 349 |
| QUALITY_ZM-IVDOM-3-3 | GRAIN_QUALITY | 57 |
| QUALITY_ZM-IVDOM-5-2 | GRAIN_QUALITY | 291 |
| QUALITY_ZM-IVDOM-5-2 | GRAIN_QUALITY | 291 |
| QUALITY_ZM-IVDOM-5-2 | GRAIN_QUALITY | 291 |
| QUALITY_ZM-IVDOM-5-2 | GRAIN_QUALITY | 291 |
| QUALITY_ZM-IVDOM-5-2 | GRAIN_QUALITY | 291 |
| QUALITY_ZM-IVDOM-9-1 | GRAIN_QUALITY | 131 |
| QUALITY_ZM-IVDOM-9-1 | GRAIN_QUALITY | 197 |
| QUALITY_ZM-IVDOM-9-1 | GRAIN_QUALITY | 131 |
| QUALITY_ZM-IVDOM-9-1 | GRAIN_QUALITY | 257 |
| QUALITY_ZM-IVDOM-9-1 | GRAIN_QUALITY | 319 |
| QUALITY_ZM-IVDOM-9-2 | GRAIN_QUALITY | 131 |
| QUALITY_ZM-IVDOM-9-2 | GRAIN_QUALITY | 197 |
| QUALITY_ZM-IVDOM-9-2 | GRAIN_QUALITY | 131 |
| QUALITY_ZM-IVDOM-9-2 | GRAIN_QUALITY | 257 |
| QUALITY_ZM-IVDOM-9-2 | GRAIN_QUALITY | 319 |
| QUALITY_ZM-PC-1-1 | GRAIN_QUALITY | 257 |
| QUALITY_ZM-PC-5-1 | GRAIN_QUALITY | 25 |
| QUALITY_ZM-PC-5-1 | GRAIN_QUALITY | 25 |
| QUALITY_ZM-PC-8-1 | GRAIN_QUALITY | 71 |
| QUALITY_ZM-PC-8-1 | GRAIN_QUALITY | 131 |
| QUALITY_ZM-PC-8-1 | GRAIN_QUALITY | 349 |
| QUALITY_ZM-PC-8-1 | GRAIN_QUALITY | 197 |
| QUALITY_ZM-PC-8-1 | GRAIN_QUALITY | 263 |
| QUALITY_ZM-PC-8-1 | GRAIN_QUALITY | 131 |
| QUALITY_ZM-PC-8-1 | GRAIN_QUALITY | 257 |
| QUALITY_ZM-PC-8-1 | GRAIN_QUALITY | 263 |
| QUALITY_ZM-PC-8-1 | GRAIN_QUALITY | 349 |
| QUALITY_ZM-PC-8-1 | GRAIN_QUALITY | 321 |
| QUALITY_ZM-PC-8-1 | GRAIN_QUALITY | 263 |
| QUALITY_ZM-PC-8-1 | GRAIN_QUALITY | 237 |
| QUALITY_ZM-PC-9-1 | GRAIN_QUALITY | 285 |
| QUALITY_ZM-PC-9-1 | GRAIN_QUALITY | 87 |
| QUALITY_ZM-PC-9-1 | GRAIN_QUALITY | 331 |
| QUALITY_ZM-PC-9-1 | GRAIN_QUALITY | 331 |
| QUALITY_ZM-PC-9-1 | GRAIN_QUALITY | 87 |
| QUALITY_ZM-PC-9-1 | GRAIN_QUALITY | 57 |
| QUALITY_ZM-PC-9-1 | GRAIN_QUALITY | 285 |
| QUALITY_ZM-PC-9-1 | GRAIN_QUALITY | 217 |
| QUALITY_ZM-PC-9-1 | GRAIN_QUALITY | 319 |
| QUALITY_ZM-STC-10-2 | GRAIN_QUALITY | 217 |
| QUALITY_ZM-STC-2-2 | GRAIN_QUALITY | 359 |
| QUALITY_ZM-STC-2-2 | GRAIN_QUALITY | 359 |
| QUALITY_ZM-STC-2-2 | GRAIN_QUALITY | 217 |
| QUALITY_ZM-STC-2-2 | GRAIN_QUALITY | 33 |
| QUALITY_ZM-STC-5-1 | GRAIN_QUALITY | 25 |
| QUALITY_ZM-STC-5-1 | GRAIN_QUALITY | 25 |
| QUALITY_ZM-STC-6-1 | GRAIN_QUALITY | 285 |
| QUALITY_ZM-STC-6-1 | GRAIN_QUALITY | 131 |
| QUALITY_ZM-STC-6-1 | GRAIN_QUALITY | 349 |
| QUALITY_ZM-STC-6-1 | GRAIN_QUALITY | 197 |
| QUALITY_ZM-STC-6-1 | GRAIN_QUALITY | 263 |
| QUALITY_ZM-STC-6-1 | GRAIN_QUALITY | 131 |
| QUALITY_ZM-STC-6-1 | GRAIN_QUALITY | 263 |
| QUALITY_ZM-STC-6-1 | GRAIN_QUALITY | 349 |
| QUALITY_ZM-STC-6-1 | GRAIN_QUALITY | 285 |
| QUALITY_ZM-STC-6-1 | GRAIN_QUALITY | 263 |
| QUALITY_ZM-STC-6-1 | GRAIN_QUALITY | 237 |
| QUALITY_ZM-STC-7-1 | GRAIN_QUALITY | 39 |
| QUALITY_ZM-STC-7-2 | GRAIN_QUALITY | 281 |
| QUALITY_ZM-STC-8-1 | GRAIN_QUALITY | 71 |
| QUALITY_ZM-STC-8-1 | GRAIN_QUALITY | 131 |
| QUALITY_ZM-STC-8-1 | GRAIN_QUALITY | 349 |
| QUALITY_ZM-STC-8-1 | GRAIN_QUALITY | 197 |
| QUALITY_ZM-STC-8-1 | GRAIN_QUALITY | 263 |
| QUALITY_ZM-STC-8-1 | GRAIN_QUALITY | 131 |
| QUALITY_ZM-STC-8-1 | GRAIN_QUALITY | 257 |
| QUALITY_ZM-STC-8-1 | GRAIN_QUALITY | 263 |
| QUALITY_ZM-STC-8-1 | GRAIN_QUALITY | 349 |
| QUALITY_ZM-STC-8-1 | GRAIN_QUALITY | 321 |
| QUALITY_ZM-STC-8-1 | GRAIN_QUALITY | 263 |
| QUALITY_ZM-STC-8-1 | GRAIN_QUALITY | 237 |
| YIELD_ZM-BIOM-2-1 | YIELD | 87 |
| YIELD_ZM-BIOM-2-1 | YIELD | 87 |
| YIELD_ZM-BIOM-3-1 | YIELD | 285 |
| YIELD_ZM-BIOM-3-1 | YIELD | 87 |
| YIELD_ZM-BIOM-3-1 | YIELD | 257 |
| YIELD_ZM-BIOM-3-1 | YIELD | 87 |
| YIELD_ZM-BIOM-7-1 | YIELD | 87 |
| YIELD_ZM-BIOM-7-1 | YIELD | 281 |
| YIELD_ZM-BIOM-7-1 | YIELD | 281 |
| YIELD_ZM-BIOM-7-1 | YIELD | 87 |
| YIELD_ZM-BIOM-8-1 | YIELD | 263 |
| YIELD_ZM-BIOM-8-1 | YIELD | 263 |
| YIELD_ZM-BIOM-8-1 | YIELD | 263 |
| YIELD_ZM-DMC-1-1 | YIELD | 257 |
| YIELD_ZM-DMC-1-2 | YIELD | 285 |
| YIELD_ZM-DMC-1-2 | YIELD | 87 |
| YIELD_ZM-DMC-1-2 | YIELD | 87 |
| YIELD_ZM-DMC-1-2 | YIELD | 217 |
| YIELD_ZM-DMC-5-1 | YIELD | 25 |
| YIELD_ZM-DMC-5-1 | YIELD | 25 |
| YIELD_ZM-DMC-6-1 | YIELD | 131 |
| YIELD_ZM-DMC-6-1 | YIELD | 87 |
| YIELD_ZM-DMC-6-1 | YIELD | 331 |
| YIELD_ZM-DMC-6-1 | YIELD | 349 |
| YIELD_ZM-DMC-6-1 | YIELD | 87 |
| YIELD_ZM-DMC-6-1 | YIELD | 319 |
| YIELD_ZM-DMC-6-2 | YIELD | 131 |
| YIELD_ZM-DMC-6-2 | YIELD | 87 |
| YIELD_ZM-DMC-6-2 | YIELD | 331 |
| YIELD_ZM-DMC-6-2 | YIELD | 87 |
| YIELD_ZM-DMC-6-2 | YIELD | 237 |
| YIELD_ZM-DMC-6-2 | YIELD | 319 |
| YIELD_ZM-DMC-6-3 | YIELD | 131 |
| YIELD_ZM-DMC-6-3 | YIELD | 349 |
| YIELD_ZM-DMY-1-3 | YIELD | 285 |
| YIELD_ZM-DMY-1-3 | YIELD | 87 |
| YIELD_ZM-DMY-1-3 | YIELD | 87 |
| YIELD_ZM-DMY-1-3 | YIELD | 217 |
| YIELD_ZM-DMY-1-4 | YIELD | 257 |
| YIELD_ZM-DMY-1-5 | YIELD | 285 |
| YIELD_ZM-DMY-1-5 | YIELD | 87 |
| YIELD_ZM-DMY-1-5 | YIELD | 87 |
| YIELD_ZM-DMY-1-5 | YIELD | 217 |
| YIELD_ZM-DMY-2-1 | YIELD | 87 |
| YIELD_ZM-DMY-2-1 | YIELD | 87 |
| YIELD_ZM-DMY-2-1 | YIELD | 217 |
| YIELD_ZM-DMY-2-3 | YIELD | 285 |
| YIELD_ZM-DMY-2-3 | YIELD | 359 |
| YIELD_ZM-DMY-2-3 | YIELD | 33 |
| YIELD_ZM-DMY-2-3 | YIELD | 233 |
| YIELD_ZM-DMY-2-3 | YIELD | 359 |
| YIELD_ZM-DMY-2-3 | YIELD | 233 |
| YIELD_ZM-DMY-2-3 | YIELD | 281 |
| YIELD_ZM-DMY-2-3 | YIELD | 281 |
| YIELD_ZM-DMY-2-3 | YIELD | 233 |
| YIELD_ZM-DMY-2-3 | YIELD | 233 |
| YIELD_ZM-DMY-2-3 | YIELD | 33 |
| YIELD_ZM-DMY-2-4 | YIELD | 359 |
| YIELD_ZM-DMY-2-4 | YIELD | 33 |
| YIELD_ZM-DMY-2-4 | YIELD | 359 |
| YIELD_ZM-DMY-2-4 | YIELD | 217 |
| YIELD_ZM-DMY-2-4 | YIELD | 33 |
| YIELD_ZM-DMY-3-1 | YIELD | 285 |
| YIELD_ZM-DMY-3-1 | YIELD | 87 |
| YIELD_ZM-DMY-3-1 | YIELD | 87 |
| YIELD_ZM-DMY-3-2 | YIELD | 349 |
| YIELD_ZM-DMY-3-2 | YIELD | 57 |
| YIELD_ZM-DMY-3-3 | YIELD | 349 |
| YIELD_ZM-DMY-3-3 | YIELD | 57 |
| YIELD_ZM-DMY-4-1 | YIELD | 59 |
| YIELD_ZM-DMY-4-2 | YIELD | 131 |
| YIELD_ZM-DMY-4-2 | YIELD | 25 |
| YIELD_ZM-DMY-4-2 | YIELD | 25 |
| YIELD_ZM-DMY-4-3 | YIELD | 291 |
| YIELD_ZM-DMY-4-3 | YIELD | 273 |
| YIELD_ZM-DMY-4-3 | YIELD | 71 |
| YIELD_ZM-DMY-4-3 | YIELD | 33 |
| YIELD_ZM-DMY-4-3 | YIELD | 291 |
| YIELD_ZM-DMY-4-3 | YIELD | 291 |
| YIELD_ZM-DMY-4-3 | YIELD | 25 |
| YIELD_ZM-DMY-4-3 | YIELD | 273 |
| YIELD_ZM-DMY-4-3 | YIELD | 291 |
| YIELD_ZM-DMY-4-3 | YIELD | 291 |
| YIELD_ZM-DMY-4-3 | YIELD | 273 |
| YIELD_ZM-DMY-4-3 | YIELD | 273 |
| YIELD_ZM-DMY-4-3 | YIELD | 25 |
| YIELD_ZM-DMY-4-3 | YIELD | 57 |
| YIELD_ZM-DMY-4-3 | YIELD | 273 |
| YIELD_ZM-DMY-4-3 | YIELD | 33 |
| YIELD_ZM-DMY-4-4 | YIELD | 131 |
| YIELD_ZM-DMY-4-4 | YIELD | 25 |
| YIELD_ZM-DMY-4-4 | YIELD | 25 |
| YIELD_ZM-DMY-5-1 | YIELD | 291 |
| YIELD_ZM-DMY-5-1 | YIELD | 291 |
| YIELD_ZM-DMY-5-1 | YIELD | 291 |
| YIELD_ZM-DMY-5-1 | YIELD | 291 |
| YIELD_ZM-DMY-5-1 | YIELD | 291 |
| YIELD_ZM-DMY-6-1 | YIELD | 131 |
| YIELD_ZM-DMY-6-1 | YIELD | 349 |
| YIELD_ZM-DMY-7-1 | YIELD | 281 |
| YIELD_ZM-DMY-7-1 | YIELD | 281 |
| YIELD_ZM-DMY-8-1 | YIELD | 71 |
| YIELD_ZM-DMY-8-1 | YIELD | 131 |
| YIELD_ZM-DMY-8-1 | YIELD | 305 |
| YIELD_ZM-DMY-8-1 | YIELD | 263 |
| YIELD_ZM-DMY-8-1 | YIELD | 257 |
| YIELD_ZM-DMY-8-1 | YIELD | 263 |
| YIELD_ZM-DMY-8-1 | YIELD | 349 |
| YIELD_ZM-DMY-8-1 | YIELD | 321 |
| YIELD_ZM-DMY-8-1 | YIELD | 263 |
| YIELD_ZM-DMY-8-1 | YIELD | 237 |
| YIELD_ZM-DMY-8-2 | YIELD | 263 |
| YIELD_ZM-DMY-8-2 | YIELD | 263 |
| YIELD_ZM-DMY-8-2 | YIELD | 263 |
| YIELD_ZM-DMY-9-1 | YIELD | 309 |
| YIELD_ZM-DMY-9-1 | YIELD | 257 |
| YIELD_ZM-DMY-9-1 | YIELD | 319 |
| YIELD_ZM-EWT-4-2 | YIELD | 131 |
| YIELD_ZM-EWT-4-2 | YIELD | 25 |
| YIELD_ZM-EWT-4-2 | YIELD | 25 |
| YIELD_ZM-GWM2-3-1 | YIELD | 349 |
| YIELD_ZM-GWM2-3-1 | YIELD | 57 |
| YIELD_ZM-GWM2-3-2 | YIELD | 285 |
| YIELD_ZM-GWM2-3-2 | YIELD | 87 |
| YIELD_ZM-GWM2-3-2 | YIELD | 257 |
| YIELD_ZM-GWM2-3-2 | YIELD | 87 |
| YIELD_ZM-GWM2-7-1 | YIELD | 87 |
| YIELD_ZM-GWM2-7-1 | YIELD | 87 |
| YIELD_ZM-GYHA-1-2 | YIELD | 71 |
| YIELD_ZM-GYHA-1-2 | YIELD | 217 |
| YIELD_ZM-GYHA-1-3 | YIELD | 319 |
| YIELD_ZM-GYHA-1-4 | YIELD | 319 |
| YIELD_ZM-GYHA-3-1 | YIELD | 285 |
| YIELD_ZM-GYHA-3-1 | YIELD | 87 |
| YIELD_ZM-GYHA-3-1 | YIELD | 87 |
| YIELD_ZM-GYHA-5-1 | YIELD | 263 |
| YIELD_ZM-GYHA-5-1 | YIELD | 331 |
| YIELD_ZM-GYHA-5-1 | YIELD | 263 |
| YIELD_ZM-GYHA-5-1 | YIELD | 263 |
| YIELD_ZM-GYHA-6-1 | YIELD | 285 |
| YIELD_ZM-GYHA-6-1 | YIELD | 131 |
| YIELD_ZM-GYHA-6-1 | YIELD | 263 |
| YIELD_ZM-GYHA-6-1 | YIELD | 263 |
| YIELD_ZM-GYHA-6-1 | YIELD | 263 |
| YIELD_ZM-GYLD-6-1 | YIELD | 131 |
| YIELD_ZM-GYLD-6-1 | YIELD | 87 |
| YIELD_ZM-GYLD-6-1 | YIELD | 331 |
| YIELD_ZM-GYLD-6-1 | YIELD | 349 |
| YIELD_ZM-GYLD-6-1 | YIELD | 87 |
| YIELD_ZM-GYLD-6-1 | YIELD | 319 |
| YIELD_ZM-GYLD-7-1 | YIELD | 87 |
| YIELD_ZM-GYLD-7-1 | YIELD | 87 |
| YIELD_ZM-HI-1-1 | YIELD | 71 |
| YIELD_ZM-HI-1-1 | YIELD | 217 |
| YIELD_ZM-HI-1-1 | YIELD | 319 |
| YIELD_ZM-HI-3-1 | YIELD | 349 |
| YIELD_ZM-HI-3-1 | YIELD | 57 |
| YIELD_ZM-HI-4-1 | YIELD | 305 |
| YIELD_ZM-HI-4-1 | YIELD | 25 |
| YIELD_ZM-HI-4-1 | YIELD | 25 |
| YIELD_ZM-HI-4-1 | YIELD | 321 |
| YIELD_ZM-HI-7-1 | YIELD | 87 |
| YIELD_ZM-HI-7-1 | YIELD | 87 |
| YIELD_ZM-HI-8-1 | YIELD | 263 |
| YIELD_ZM-HI-8-1 | YIELD | 263 |
| YIELD_ZM-HI-8-1 | YIELD | 263 |
| YIELD_ZM-KNE-4-1 | YIELD | 131 |
| YIELD_ZM-KNE-4-1 | YIELD | 25 |
| YIELD_ZM-KNE-4-1 | YIELD | 25 |
| YIELD_ZM-KW100-1-2 | YIELD | 319 |
| YIELD_ZM-KW100-3-1 | YIELD | 285 |
| YIELD_ZM-KW100-3-1 | YIELD | 87 |
| YIELD_ZM-KW100-3-1 | YIELD | 87 |
| YIELD_ZM-KW100-9-1 | YIELD | 99 |
| YIELD_ZM-KW100-9-1 | YIELD | 131 |
| YIELD_ZM-KW100-9-1 | YIELD | 309 |
| YIELD_ZM-KW100-9-1 | YIELD | 331 |
| YIELD_ZM-KW100-9-1 | YIELD | 257 |
| YIELD_ZM-KW100-9-1 | YIELD | 319 |
| YIELD_ZM-KW300-1-2 | YIELD | 257 |
| YIELD_ZM-KW300-3-2 | YIELD | 349 |
| YIELD_ZM-KW300-3-2 | YIELD | 57 |
| YIELD_ZM-KW300-3-3 | YIELD | 285 |
| YIELD_ZM-KW300-3-3 | YIELD | 87 |
| YIELD_ZM-KW300-3-3 | YIELD | 87 |
| YIELD_ZM-KW300-4-2 | YIELD | 131 |
| YIELD_ZM-KW300-4-2 | YIELD | 25 |
| YIELD_ZM-KW300-4-2 | YIELD | 25 |
| YIELD_ZM-KW300-6-1 | YIELD | 131 |
| YIELD_ZM-KW300-6-1 | YIELD | 349 |
| YIELD_ZM-KW300-6-2 | YIELD | 285 |
| YIELD_ZM-KW300-6-2 | YIELD | 131 |
| YIELD_ZM-KW300-6-2 | YIELD | 263 |
| YIELD_ZM-KW300-6-2 | YIELD | 263 |
| YIELD_ZM-KW300-6-2 | YIELD | 263 |
| YIELD_ZM-KW300-8-1 | YIELD | 71 |
| YIELD_ZM-KW300-8-1 | YIELD | 305 |
| YIELD_ZM-KW300-8-1 | YIELD | 349 |
| YIELD_ZM-KW300-8-1 | YIELD | 321 |
| YIELD_ZM-KW300-9-1 | YIELD | 285 |
| YIELD_ZM-KW300-9-1 | YIELD | 87 |
| YIELD_ZM-KW300-9-1 | YIELD | 331 |
| YIELD_ZM-KW300-9-1 | YIELD | 87 |
| YIELD_ZM-KW300-9-1 | YIELD | 57 |
| YIELD_ZM-KW300-9-1 | YIELD | 217 |
| YIELD_ZM-KW300-9-2 | YIELD | 285 |
| YIELD_ZM-KW300-9-2 | YIELD | 99 |
| YIELD_ZM-KW300-9-2 | YIELD | 87 |
| YIELD_ZM-KW300-9-2 | YIELD | 331 |
| YIELD_ZM-KW300-9-2 | YIELD | 87 |
| YIELD_ZM-KW300-9-2 | YIELD | 57 |
| YIELD_ZM-KW300-9-2 | YIELD | 217 |
| YIELD_ZM-KWE-4-1 | YIELD | 131 |
| YIELD_ZM-KWE-4-1 | YIELD | 25 |
| YIELD_ZM-KWE-4-1 | YIELD | 25 |

[0622] TABLE 6B
References for the listed quantitative trait loci (QTLs) listed
in Table 6A

| REFERENCE | QTL |
|---|---|
| THEOR APPL GENET (1998) 97:744-755 | ZM-LABA-1-1 |
| THEOR APPL GENET (1998) 97:744-755 | ZM-LABA-1-2 |
| THEOR APPL GENET (1998) 97:744-755 | ZM-LABA-2-4 |
| THEOR APPL GENET (1998) 97:744-755 | ZM-LABA-2-3 |
| THEOR APPL GENET (1998) 97:744-755 | ZM-LABA-2-1 |
| THEOR APPL GENET (1998) 97:744-755 | ZM-LABA-3-1 |
| THEOR APPL GENET (1998) 97:744-755 | ZM-LABA-4-2 |
| THEOR APPL GENET (1998) 97:744-755 | ZM-LABA-4-1 |
| THEOR APPL GENET (1998) 97:744-755 | ZM-LABA-7-1 |
| THEOR APPL GENET (1998) 97:744-755 | ZM-LABA-7-2 |
| THEOR APPL GENET (1998) 97:744-755 | ZM-LABA-9-1 |
| THEOR APPL GENET (1998) 97:744-755 | ZM-LABA-10-2 |
| GENETICS (1998) 149:1997-2006 | ZM-CELW-5-1 |
| GENETICS (1998) 149:1997-2006 | ZM-CELW-6-1 |
| PHYTOPATHOLOGY (1998) 88:1324-1329 | ZM-CRR-1-10 |
| PHYTOPATHOLOGY (1998) 88:1324-1329 | ZM-CRR-6-4 |
| PHYTOPATHOLOGY (1998) 88:1324-1329 | ZM-CRR-9-2 |
| PHYTOPATHOLOGY (1998) 88:1324-1329 | ZM-CRR-1-12 |
| PHYTOPATHOLOGY (1998) 88:1324-1329 | ZM-CRR-1-11 |
| PHYTOPATHOLOGY (1998) 88:1324-1329 | ZM-CRR-4-3 |
| PHYTOPATHOLOGY (1998) 88:1324-1329 | ZM-CRR-7-5 |
| PHYTOPATHOLOGY (1998) 88:1324-1329 | ZM-CRR-8-6 |
| PHYTOPATHOLOGY (1998) 88:1324-1329 | ZM-CRR-9-3 |
| PHYTOPATHOLOGY (1998) 88:1324-1329 | ZM-CRR-1-13 |
| PHYTOPATHOLOGY (1998) 88:1324-1329 | ZM-CRR-2-11 |
| PHYTOPATHOLOGY (1998) 88:1324-1329 | ZM-CRR-3-7 |
| PHYTOPATHOLOGY (1998) 88:1324-1329 | ZM-CRR-3-6 |
| PHYTOPATHOLOGY (1998) 88:1324-1329 | ZM-CRR-4-5 |
| PHYTOPATHOLOGY (1998) 88:1324-1329 | ZM-CRR-4-4 |
| PHYTOPATHOLOGY (1998) 88:1324-1329 | ZM-CRR-5-6 |
| PHYTOPATHOLOGY (1998) 88:1324-1329 | ZM-CRR-5-7 |
| PHYTOPATHOLOGY (1998) 88:1324-1329 | ZM-CRR-6-5 |
| PHYTOPATHOLOGY (1998) 88:1324-1329 | ZM-CRR-7-6 |
| PHYTOPATHOLOGY (1998) 88:1324-1329 | ZM-CRR-8-7 |
| PHYTOPATHOLOGY (1998) 88:1324-1329 | ZM-CRR-9-4 |
| THEOR APPL GENET (1998) 97:1321-1330 | ZM-PCSI-1-1 |
| THEOR APPL GENET (1998) 97:1321-1330 | ZM-PCSI-2-1 |
| THEOR APPL GENET (1998) 97:1321-1330 | ZM-PCSI-3-1 |
| THEOR APPL GENET (1998) 97:1321-1330 | ZM-PCSI-3-2 |
| THEOR APPL GENET (1998) 97:1321-1330 | ZM-PCSI-4-1 |
| THEOR APPL GENET (1998) 97:1321-1330 | ZM-PCSI-5-1 |
| THEOR APPL GENET (1998) 97:1321-1330 | ZM-PCSI-9-2 |
| THEOR APPL GENET (1998) 97:1321-1330 | ZM-PCSI-9-1 |
| THEOR APPL GENET (1998) 97:1321-1330 | ZM-PCSI-1-2 |
| THEOR APPL GENET (1998) 97:1321-1330 | ZM-PCSI-3-3 |
| THEOR APPL GENET (1998) 97:1321-1330 | ZM-PCSI-5-2 |
| THEOR APPL GENET (1998) 97:1321-1330 | ZM-PCSI-6-1 |
| THEOR APPL GENET (1998) 97:1321-1330 | ZM-PCSI-1-4 |
| THEOR APPL GENET (1998) 97:1321-1330 | ZM-PCSI-2-4 |
| THEOR APPL GENET (1998) 97:1321-1330 | ZM-PCSI-3-4 |
| THEOR APPL GENET (1998) 97:1321-1330 | ZM-PCSI-5-3 |
| THEOR APPL GENET (1998) 97:1321-1330 | ZM-PCSI-1-5 |
| THEOR APPL GENET (1998) 97:1321-1330 | ZM-PCSI-1-6 |
| THEOR APPL GENET (1998) 97:1321-1330 | ZM-PCSI-2-5 |
| THEOR APPL GENET (1998) 97:1321-1330 | ZM-PCSI-3-5 |
| THEOR APPL GENET (1998) 97:1321-1330 | ZM-PCSI-4-2 |
| THEOR APPL GENET (1998) 97:1321-1330 | ZM-PCSI-4-3 |
| THEOR APPL GENET (1998) 97:1321-1330 | ZM-PCSI-4-5 |
| THEOR APPL GENET (1998) 97:1321-1330 | ZM-PCSI-5-5 |
| THEOR APPL GENET (1998) 97:1321-1330 | ZM-PCSI-7-1 |
| THEOR APPL GENET (1998) 97:1321-1330 | ZM-PCSI-7-2 |
| THEOR APPL GENET (1998) 97:1321-1330 | ZM-PCSI-9-3 |
| THEOR APPL GENET (1998) 97:1321-1330 | ZM-CSVEG-1-1 |
| THEOR APPL GENET (1998) 97:1321-1330 | ZM-CSVEG-4-1 |
| THEOR APPL GENET (1998) 97:1321-1330 | ZM-CSVEG-4-2 |
| THEOR APPL GENET (1998) 97:1321-1330 | ZM-CSVEG-7-1 |
| THEOR APPL GENET (1998) 97:1321-1330 | ZM-CSVEG-9-1 |
| THEOR APPL GENET (1998) 97:1321-1330 | ZM-CSVSG-1-1 |
| THEOR APPL GENET (1998) 97:1321-1330 | ZM-CSVSG-4-1 |
| CROP SCI (1998) 38:1062-1072 | ZM-LT-1-1 |
| CROP SCI (1998) 38:1062-1072 | ZM-LT-1-2 |
| CROP SCI (1998) 38:1062-1072 | ZM-LT-4-1 |
| CROP SCI (1998) 38:1062-1072 | ZM-LT-7-1 |
| CROP SCI (1998) 38:1062-1072 | ZM-PC-1-1 |
| CROP SCI (1998) 38:1062-1072 | ZM-PC-5-1 |
| CROP SCI (1998) 38:1062-1072 | ZM-PC-8-1 |
| CROP SCI (1998) 38:1062-1072 | ZM-PC-9-1 |
| CROP SCI (1998) 38:1062-1072 | ZM-SWCBR-1-4 |
| CROP SCI (1998) 38:1062-1072 | ZM-SWCBR-1-3 |
| CROP SCI (1998) 38:1062-1072 | ZM-SWCBR-1-2 |
| CROP SCI (1998) 38:1062-1072 | ZM-SWCBR-1-5 |
| CROP SCI (1998) 38:1062-1072 | ZM-SWCBR-5-3 |
| CROP SCI (1998) 38:1062-1072 | ZM-SWCBR-7-3 |
| CROP SCI (1998) 38:1062-1072 | ZM-SWCBR-8-2 |
| CROP SCI (1998) 38:1062-1072 | ZM-SWCBR-9-2 |
| CROP SCI (1998) 38:1062-1072 | ZM-SCBR-1-2 |
| CROP SCI (1998) 38:1062-1072 | ZM-SCBR-1-1 |
| CROP SCI (1998) 38:1062-1072 | ZM-SCBR-5-1 |
| CROP SCI (1998) 38:1062-1072 | ZM-SCBR-7-1 |
| CROP SCI (1998) 38:1062-1072 | ZM-SCBR-8-1 |
| CROP SCI (1998) 38:1062-1072 | ZM-SCBR-9-1 |
| CROP SCI (1998) 38:1062-1072 | ZM-LT-5-1 |
| CROP SCI (1998) 38:1062-1072 | ZM-SWCBR-1-6 |
| CROP SCI (1998) 38:1062-1072 | ZM-SWCBR-6-3 |
| CROP SCI (1998) 38:1062-1072 | ZM-SWCBR-9-3 |
| CROP SCI (1998) 38:1062-1072 | ZM-SWCBR-9-4 |
| PLANT BREEDING (1998) 117:309-318 | ZM-ASI-8-1 |
| PLANT BREEDING (1998) 117:309-318 | ZM-SILK-3-1 |
| PLANT BREEDING (1998) 117:309-318 | ZM-SILK-4-1 |
| PLANT BREEDING (1998) 117:309-318 | ZM-SWCBR-3-1 |
| PLANT BREEDING (1998) 117:309-318 | ZM-SWCBR-5-1 |
| PLANT BREEDING (1998) 117:309-318 | ZM-SWCBR-5-2 |
| PLANT BREEDING (1998) 117:309-318 | ZM-SWCBR-6-1 |
| PLANT BREEDING (1998) 117:309-318 | ZM-SWCBR-6-2 |
| PLANT BREEDING (1998) 117:309-318 | ZM-SWCBR-8-1 |
| PLANT BREEDING (1998) 117:309-318 | ZM-SWCBR-9-1 |
| PLANT BREEDING (1998) 117:193-202 | ZM-ASI-1-3 |
| PLANT BREEDING (1998) 117:193-202 | ZM-GYLD-7-1 |
| PLANT BREEDING (1998) 117:193-202 | ZM-SILK-3-2 |
| PLANT BREEDING (1998) 117:193-202 | ZM-SILK-6-2 |
| PLANT BREEDING (1998) 117:193-202 | ZM-SILK-7-2 |
| PLANT BREEDING (1998) 117:193-202 | ZM-SILK-8-1 |
| PLANT BREEDING (1998) 117:193-202 | ZM-SILK-9-3 |
| PLANT BREEDING (1998) 117:193-202 | ZM-SWCBR-1-1 |
| PLANT BREEDING (1998) 117:193-202 | ZM-SWCBR-3-2 |
| PLANT BREEDING (1998) 117:193-202 | ZM-SWCBR-7-1 |
| PLANT BREEDING (1998) 117:193-202 | ZM-SWCBR-7-2 |
| PLANT BREEDING (1998) 117:193-202 | ZM-ASI-1-5 |
| PLANT BREEDING (1998) 117:193-202 | ZM-ASI-3-4 |
| PLANT BREEDING (1998) 117:193-202 | ZM-ASI-5-3 |
| PLANT BREEDING (1998) 117:193-202 | ZM-ASI-10-2 |
| PLANT BREEDING (1998) 117:193-202 | ZM-GYLD-6-1 |
| PLANT BREEDING (1998) 117:193-202 | ZM-SILK-3-5 |
| CROP SCI (1998) 38:1278-1289 | ZM-CPC-7-1 |
| CROP SCI (1998) 38:1278-1289 | ZM-DMC-5-1 |
| CROP SCI (1998) 38:1278-1289 | ZM-DMC-6-2 |
| CROP SCI (1998) 38:1278-1289 | ZM-DMC-6-1 |
| CROP SCI (1998) 38:1278-1289 | ZM-DMY-3-1 |
| CROP SCI (1998) 38:1278-1289 | ZM-DMY-4-2 |
| CROP SCI (1998) 38:1278-1289 | ZM-DMY-4-1 |
| CROP SCI (1998) 38:1278-1289 | ZM-DMY-7-1 |
| CROP SCI (1998) 38:1278-1289 | ZM-DMY-8-1 |
| CROP SCI (1998) 38:1278-1289 | ZM-DMY-9-1 |
| CROP SCI (1998) 38:1278-1289 | ZM-IVDOM-3-1 |
| CROP SCI (1998) 38:1278-1289 | ZM-IVDOM-5-2 |
| CROP SCI (1998) 38:1278-1289 | ZM-STC-5-1 |
| CROP SCI (1998) 38:1278-1289 | ZM-STC-7-1 |
| CROP SCI (1998) 38:1278-1289 | ZM-STC-8-1 |
| CROP SCI (1998) 38:1278-1289 | ZM-CPC-1-4 |
| CROP SCI (1998) 38:1278-1289 | ZM-CPC-1-3 |
| CROP SCI (1998) 38:1278-1289 | ZM-CPC-1-2 |
| CROP SCI (1998) 38:1278-1289 | ZM-CPC-3-2 |
| CROP SCI (1998) 38:1278-1289 | ZM-CPC-3-1 |
| CROP SCI (1998) 38:1278-1289 | ZM-CPC-6-1 |
| CROP SCI (1998) 38:1278-1289 | ZM-CPC-7-3 |
| CROP SCI (1998) 38:1278-1289 | ZM-CPC-7-2 |
| CROP SCI (1998) 38:1278-1289 | ZM-DMC-1-1 |
| CROP SCI (1998) 38:1278-1289 | ZM-DMY-1-3 |
| CROP SCI (1998) 38:1278-1289 | ZM-DMY-2-4 |
| CROP SCI (1998) 38:1278-1289 | ZM-DMY-2-3 |
| CROP SCI (1998) 38:1278-1289 | ZM-DMY-2-1 |
| CROP SCI (1998) 38:1278-1289 | ZM-DMY-3-2 |
| CROP SCI (1998) 38:1278-1289 | ZM-DMY-5-1 |
| CROP SCI (1998) 38:1278-1289 | ZM-DMY-6-1 |
| CROP SCI (1998) 38:1278-1289 | ZM-DMY-8-2 |
| CROP SCI (1998) 38:1278-1289 | ZM-IVDOM-1-2 |
| CROP SCI (1998) 38:1278-1289 | ZM-IVDOM-1-1 |
| CROP SCI (1998) 38:1278-1289 | ZM-IVDOM-10-1 |
| CROP SCI (1998) 38:1278-1289 | ZM-STC-6-1 |
| CROP SCI (1998) 38:1278-1289 | ZM-CPC-1-5 |
| CROP SCI (1998) 38:1278-1289 | ZM-CPC-1-6 |
| CROP SCI (1998) 38:1278-1289 | ZM-CPC-3-3 |
| CROP SCI (1998) 38:1278-1289 | ZM-CPC-6-2 |
| CROP SCI (1998) 38:1278-1289 | ZM-CPC-10-1 |
| CROP SCI (1998) 38:1278-1289 | ZM-DMC-1-2 |
| CROP SCI (1998) 38:1278-1289 | ZM-DMC-6-3 |
| CROP SCI (1998) 38:1278-1289 | ZM-DMY-1-4 |
| CROP SCI (1998) 38:1278-1289 | ZM-DMY-1-5 |
| CROP SCI (1998) 38:1278-1289 | ZM-DMY-3-3 |
| CROP SCI (1998) 38:1278-1289 | ZM-DMY-4-4 |
| CROP SCI (1998) 38:1278-1289 | ZM-DMY-4-3 |
| CROP SCI (1998) 38:1278-1289 | ZM-IVDOM-1-4 |
| CROP SCI (1998) 38:1278-1289 | ZM-IVDOM-3-3 |
| CROP SCI (1998) 38:1278-1289 | ZM-IVDOM-9-2 |
| CROP SCI (1998) 38:1278-1289 | ZM-IVDOM-9-1 |
| CROP SCI (1998) 38:1278-1289 | ZM-IVDOM-10-2 |
| CROP SCI (1998) 38:1278-1289 | ZM-STC-2-2 |
| CROP SCI (1998) 38:1278-1289 | ZM-STC-7-2 |
| CROP SCI (1998) 38:1278-1289 | ZM-STC-10-2 |
| CROP SCI (1998) 38:1296-1308 | ZM-GYHA-1-2 |
| CROP SCI (1998) 38:1296-1308 | ZM-GYHA-1-4 |
| CROP SCI (1998) 38:1296-1308 | ZM-GYHA-1-3 |
| CROP SCI (1998) 38:1296-1308 | ZM-GYHA-3-1 |
| CROP SCI (1998) 38:1296-1308 | ZM-GYHA-5-1 |
| CROP SCI (1998) 38:1296-1308 | ZM-GYHA-6-1 |
| CROP SCI (1998) 38:1296-1308 | ZM-KW300-1-2 |
| CROP SCI (1998) 38:1296-1308 | ZM-KW300-3-3 |
| CROP SCI (1998) 38:1296-1308 | ZM-KW300-3-2 |
| CROP SCI (1998) 38:1296-1308 | ZM-KW300-4-2 |
| CROP SCI (1998) 38:1296-1308 | ZM-KW300-6-2 |
| CROP SCI (1998) 38:1296-1308 | ZM-KW300-6-1 |
| CROP SCI (1998) 38:1296-1308 | ZM-KW300-8-1 |
| CROP SCI (1998) 38:1296-1308 | ZM-KW300-9-1 |
| CROP SCI (1998) 38:1296-1308 | ZM-KW300-9-2 |
| THEOR APPL GENET (1999) 99:519-523 | ZM-DMS-1-2 |
| THEOR APPL GENET (1999) 99:519-523 | ZM-DMS-1-1 |
| THEOR APPL GENET (1999) 99:519-523 | ZM-DMS-9-1 |
| THEOR APPL GENET (1999) 99:289-295 | ZM-ASI-7-2 |
| THEOR APPL GENET (1999) 99:289-295 | ZM-DTOL-4-3 |
| THEOR APPL GENET (1999) 99:280-288 | ZM-DTOL-1-1 |
| THEOR APPL GENET (1999) 99:280-288 | ZM-DTOL-4-1 |
| THEOR APPL GENET (1999) 99:280-288 | ZM-DTOL-9-1 |
| THEOR APPL GENET (1999) 99:280-288 | ZM-EWT-4-2 |
| THEOR APPL GENET (1999) 99:280-288 | ZM-KNE-4-1 |
| THEOR APPL GENET (1999) 99:280-288 | ZM-KWE-4-1 |
| THEOR APPL GENET (1999) 99:593-598 | ZM-CRR-1-14 |
| THEOR APPL GENET (1999) 99:593-598 | ZM-CRR-1-15 |
| THEOR APPL GENET (1999) 99:593-598 | ZM-CRR-3-8 |
| THEOR APPL GENET (1999) 99:593-598 | ZM-CRR-5-9 |
| THEOR APPL GENET (1999) 99:593-598 | ZM-CRR-6-6 |
| THEOR APPL GENET (1999) 99:593-598 | ZM-PCSI-1-7 |
| THEOR APPL GENET (1999) 99:593-598 | ZM-PCSI-3-6 |
| THEOR APPL GENET (1999) 99:593-598 | ZM-PCSI-4-6 |
| THEOR APPL GENET (1999) 99:593-598 | ZM-PCSI-5-7 |
| THEOR APPL GENET (1999) 99:593-598 | ZM-PCSI-7-3 |
| THEOR APPL GENET (1999) 99:593-598 | ZM-PHSI-4-1 |
| THEOR APPL GENET (1999) 99:593-598 | ZM-PHSI-5-1 |
| THEOR APPL GENET (1999) 99:593-598 | ZM-PHSI-6-2 |
| THEOR APPL GENET (1999) 99:593-598 | ZM-PHSI-6-3 |
| THEOR APPL GENET (1999) 99:593-598 | ZM-PHSI-6-1 |
| THEOR APPL GENET (1999) 99:593-598 | ZM-PHSI-8-1 |
| THEOR APPL GENET (1999) 99:593-598 | ZM-PHSI-9-1 |
| CROP SCI (1999) 39:1171-1177 | ZM-HPVI-3-1 |
| CROP SCI (1999) 39:1171-1177 | ZM-HPVI-6-1 |
| CROP SCI (1999) 39:1171-1177 | ZM-LVI-4-1 |
| CROP SCI (1999) 39:1171-1177 | ZM-LVI-5-1 |
| CROP SCI (1999) 39:1171-1177 | ZM-LVI-6-1 |
| CROP SCI (1999) 39:514-523 | ZM-ADCNLB-3-1 |
| CROP SCI (1999) 39:514-523 | ZM-ADCNLB-3-2 |
| CROP SCI (1999) 39:514-523 | ZM-ADCNLB-5-3 |
| CROP SCI (1999) 39:514-523 | ZM-ADCNLB-5-2 |
| CROP SCI (1999) 39:514-523 | ZM-ADCNLB-5-1 |
| CROP SCI (1999) 39:514-523 | ZM-ADCNLB-9-1 |
| CROP SCI (1999) 39:514-523 | ZM-DTA-3-2 |
| CROP SCI (1999) 39:514-523 | ZM-DTA-3-1 |
| CROP SCI (1999) 39:514-523 | ZM-DTA-4-1 |
| CROP SCI (1999) 39:514-523 | ZM-NLBIP-3-1 |
| CROP SCI (1999) 39:514-523 | ZM-NLBIP-4-1 |
| CROP SCI (1999) 39:514-523 | ZM-NLBIP-5-1 |
| CROP SCI (1999) 39:514-523 | ZM-NLBIP-8-1 |
| CROP SCI (1999) 39:514-523 | ZM-NLBIP-9-1 |
| THEOR APPL GENET (1999) 98:1036-1045 | ZM-NLBDS-3-2 |
| THEOR APPL GENET (1999) 98:1036-1045 | ZM-NLBDS-5-2 |
| THEOR APPL GENET (1999) 98:1036-1045 | ZM-NLBDS-5-1 |
| THEOR APPL GENET (1999) 98:1036-1045 | ZM-NLBDS-5-3 |
| THEOR APPL GENET (1999) 98:1036-1045 | ZM-NLBDS-8-1 |
| THEOR APPL GENET (1999) 98:1036-1045 | ZM-NLBDS-9-1 |
| THEOR APPL GENET (1999) 98:1036-1045 | ZM-NLBDS-10-2 |
| THEOR APPL GENET (1999) 99:649-655 | ZM-NLBDS-1-1 |
| THEOR APPL GENET (1999) 99:649-655 | ZM-NLBDS-3-5 |
| THEOR APPL GENET (1999) 99:649-655 | ZM-NLBDS-4-2 |
| THEOR APPL GENET (1999) 99:649-655 | ZM-NLBDS-4-1 |
| THEOR APPL GENET (1999) 99:649-655 | ZM-NLBDS-5-5 |
| THEOR APPL GENET (1999) 99:649-655 | ZM-NLBDS-6-1 |
| THEOR APPL GENET (1999) 99:649-655 | ZM-NLBDS-8-2 |
| THEOR APPL GENET (1999) 99:649-655 | ZM-NLBDS-9-2 |
| THEOR APPL GENET (1999) 99:524-539 | ZM-AUT-1-1 |
| THEOR APPL GENET (1999) 99:524-539 | ZM-AUT-10-1 |
| THEOR APPL GENET (1999) 99:524-539 | ZM-APIT-1-1 |
| THEOR APPL GENET (1999) 99:524-539 | ZM-APIT-2-1 |
| THEOR APPL GENET (1999) 99:524-539 | ZM-APIT-3-1 |
| THEOR APPL GENET (1999) 99:524-539 | ZM-APIT-9-1 |
| THEOR APPL GENET (1999) 99:524-539 | ZM-APIT-10-1 |
| THEOR APPL GENET (1999) 99:524-539 | ZM-ANMT-1-1 |
| THEOR APPL GENET (1999) 99:524-539 | ZM-ANMT-2-1 |
| THEOR APPL GENET (1999) 99:524-539 | ZM-ANMT-10-1 |
| THEOR APPL GENET (1999) 99:524-539 | ZM-MSVI-1-1 |
| THEOR APPL GENET (1999) 99:524-539 | ZM-MSVI-1-2 |
| THEOR APPL GENET (1999) 99:524-539 | ZM-MSVI-2-1 |
| THEOR APPL GENET (1999) 99:524-539 | ZM-MSVI-3-2 |
| THEOR APPL GENET (1999) 99:524-539 | ZM-MSVI-3-1 |
| THEOR APPL GENET (1999) 99:524-539 | ZM-MSVI-9-1 |
| THEOR APPL GENET (1999) 99:524-539 | ZM-MSVI-10-1 |
| THEOR APPL GENET (1999) 99:540-553 | ZM-AUT-1-2 |
| THEOR APPL GENET (1999) 99:540-553 | ZM-AUT-3-1 |
| THEOR APPL GENET (1999) 99:540-553 | ZM-AUT-6-1 |
| THEOR APPL GENET (1999) 99:540-553 | ZM-AUT-10-2 |
| THEOR APPL GENET (1999) 99:540-553 | ZM-APIT-1-2 |
| THEOR APPL GENET (1999) 99:540-553 | ZM-APIT-3-2 |
| THEOR APPL GENET (1999) 99:540-553 | ZM-APIT-6-1 |
| THEOR APPL GENET (1999) 99:540-553 | ZM-APIT-10-2 |
| THEOR APPL GENET (1999) 99:540-553 | ZM-ANMT-1-2 |
| THEOR APPL GENET (1999) 99:540-553 | ZM-ANMT-5-1 |
| THEOR APPL GENET (1999) 99:540-553 | ZM-ANMT-10-2 |
| THEOR APPL GENET (1999) 99:1106-1119 | ZM-ASI-4-2 |
| THEOR APPL GENET (1999) 99:1106-1119 | ZM-ASI-7-5 |
| THEOR APPL GENET (1999) 99:1106-1119 | ZM-BIOM-2-1 |
| THEOR APPL GENET (1999) 99:1106-1119 | ZM-BIOM-3-1 |
| THEOR APPL GENET (1999) 99:1106-1119 | ZM-BIOM-7-1 |
| THEOR APPL GENET (1999) 99:1106-1119 | ZM-BIOM-8-1 |
| THEOR APPL GENET (1999) 99:1106-1119 | ZM-CRR-3-9 |
| THEOR APPL GENET (1999) 99:1106-1119 | ZM-CRR-4-6 |
| THEOR APPL GENET (1999) 99:1106-1119 | ZM-CRR-9-5 |
| THEOR APPL GENET (1999) 99:1106-1119 | ZM-DTA-4-2 |
| THEOR APPL GENET (1999) 99:1106-1119 | ZM-DTA-8-4 |
| THEOR APPL GENET (1999) 99:1106-1119 | ZM-ETURI-2-1 |
| THEOR APPL GENET (1999) 99:1106-1119 | ZM-ETURI-5-1 |
| THEOR APPL GENET (1999) 99:1106-1119 | ZM-HMAYI-3-1 |
| THEOR APPL GENET (1999) 99:1106-1119 | ZM-HI-1-1 |
| THEOR APPL GENET (1999) 99:1106-1119 | ZM-HI-3-1 |
| THEOR APPL GENET (1999) 99:1106-1119 | ZM-HI-4-1 |
| THEOR APPL GENET (1999) 99:1106-1119 | ZM-HI-7-1 |
| THEOR APPL GENET (1999) 99:1106-1119 | ZM-HI-8-1 |
| THEOR APPL GENET (1999) 99:1106-1119 | ZM-KW100-1-2 |
| THEOR APPL GENET (1999) 99:1106-1119 | ZM-KW100-3-1 |
| THEOR APPL GENET (1999) 99:1106-1119 | ZM-KW100-9-1 |
| THEOR APPL GENET (1999) 99:1106-1119 | ZM-GWM2-3-1 |
| THEOR APPL GENET (1999) 99:1106-1119 | ZM-GWM2-3-2 |
| THEOR APPL GENET (1999) 99:1106-1119 | ZM-GWM2-7-1 |
| CROP SCI (2001) 41:690-697 | ZM-CPC-1-2 |
| CROP SCI (2001) 41:690-697 | ZM-CPC-6-1 |
| CROP SCI (2001) 41:690-697 | ZM-CPC-7-1 |
| CROP SCI (2001) 41:690-697 | ZM-DMY-6-1 |
| CROP SCI (2001) 41:690-697 | ZM-DMY-8-1 |
| CROP SCI (2001) 41:690-697 | ZM-DMC-5-1 |
| CROP SCI (2001) 41:690-697 | ZM-SILK-8-1 |
| CROP SCI (2001) 41:690-697 | ZM-STC-5-1 |
| CROP SCI (2001) 41:690-697 | ZM-STC-8-1 |
| THEOR APPL GENET (2001) 102:230-243 | ZM-DMC-1-1 |
| THEOR APPL GENET (2001) 102:230-243 | ZM-DMC-5-1 |
| THEOR APPL GENET (2001) 102:230-243 | ZM-DMC-6-1 |
| THEOR APPL GENET (2001) 102:163-176 | ZM-SILK-3-1 |
| THEOR APPL GENET (2001) 102:163-176 | ZM-SILK-4-1 |
| THEOR APPL GENET (2001) 102:163-176 | ZM-SILK-6-2 |
| THEOR APPL GENET (2001) 102:163-176 | ZM-SILK-7-2 |
| THEOR APPL GENET (2001) 102:163-176 | ZM-SILK-8-1 |
| THEOR APPL GENET (2001) 102:163-176 | ZM-ASI-1-3 |
| THEOR APPL GENET (2001) 102:163-176 | ZM-ASI-7-2 |
| THEOR APPL GENET (2001) 102:163-176 | ZM-ASI-8-1 |

[0623] TABLE 7
Swiss Prot Information

Seq ID: 1
Accession: P13983
Swissprot_id: EXTN_TOBAC
Gi_number: 119714
Description: Extensin precursor (Cell wall hydroxyproline-rich

glycoprotein)

Seq ID: 3
Accession: P52835
Swissprot_id: F3ST_FLABI
Gi_number: 1706738
Description: FLAVONOL 3-SULFOTRANSFERASE (F3-ST)
Seq ID: 7
Accession: P91428
Swissprot_id: COQ4_CAEEL
Gi_number: 3121872
Description: UBIQUINONE BIOSYNTHESIS PROTEIN COQ4 HOMOLOG
Seq ID: 13
Accession: P25087
Swissprot_id: ERG6_YEAST
Gi_number: 462024
Description: DELTA(24)-STEROL C-METHYLTRANSFERASE
Seq ID: 15
Accession: P52837
Swissprot_id: F4ST_FLACH
Gi_number: 1706740
Description: FLAVONOL 4′-SULFOTRANSFERASE (F4-ST)
Seq ID: 19
Accession: Q43207
Swissprot_id: FKB7_WHEAT
Gi_number: 3023751
Description: 70 kDa peptidylprolyl isomerase (Peptidylprolyl cis-trans

isomerase) (Cyclophilin) (PPiase)

Seq ID: 21
Accession: P51659
Swissprot_id: DHB4_HUMAN
Gi_number: 1706396
Description: Estradiol 17 beta-dehydrogenase 4 (17-beta-HSD 4)

(17-beta-hydroxysteroid dehydrogenase 4)

Seq ID: 23
Accession: Q92696
Swissprot_id: PGTA_HUMAN
Gi_number: 6093707
Description: RAB geranylgeranyltransferase alpha subunit (RAB

geranyl-geranyltransferase alpha subunit) (RAB GG
transferase alpha) (RAB GGTase alpha)

Seq ID: 25
Accession: P08547
Swissprot_id: LIN1_HUMAN
Gi_number: 126295
Description: LINE-1 REVERSE TRANSCRIPTASE HOMOLOG
Seq ID: 31
Accession: P23514
Swissprot_id: COPB_RAT
Gi_number: 116923
Description: COATOMER BETA SUBUNIT (BETA-COAT PROTEIN) (BETA-COP)
Seq ID: 37
Accession: P43293
Swissprot_id: NAK_ARATH
Gi_number: 1171642
Description: Probable serine/threonine-protem kinase NAK
Seq ID: 39
Accession: P19338
Swissprot_id: NUCL_HUMAN
Gi_number: 128841
Description: Nucleolin (Protein C23)
Seq ID: 41
Accession: Q24120
Swissprot_id: CAPU_DROME
Gi_number: 13124006
Description: CAPPUCCINO PROTEIN
Seq ID: 43
Accession: Q03363
Swissprot_id: DNJ1_ALLPO
Gi_number: 461942
Description: DnaJ protein homolog 1 (DNAJ-1)
Seq ID: 45
Accession: P04929
Swissprot_id: HRPX_PLALO
Gi_number: 123530
Description: HISTIDINE-RICH GLYCOPROTEIN PRECURSOR
Seq ID: 47
Accession: P13983
Swissprot_id: EXTN_TOBAC
Gi_number: 119714
Description: Extensin precursor (Cell wall hydroxyproline-rich

glycoprotem)

Seq ID: 55
Accession: P74457
Swissprot_id: PYRH_SYNY3
Gi_number: 2497492
Description: Uridylate kinase (UK) (Uridine monophosphate kinase) (UMP

kinase)

Seq ID: 59
Accession: P08640
Swissprot_id: AMYH_YEAST
Gi_number: 728850
Description: GLUCOAMYLASE S1/S2 PRECURSOR (GLUCAN

1,4-ALPHA-GLUCOSIDASE) (1,4-ALPHA-D-GLUCAN GLUCOHYDROLASE)

Seq ID: 63
Accession: Q16620
Swissprot_id: TRKB_HUMAN
Gi_number: 2497560
Description: BDNF/NT-3 GROWTH FACTORS RECEPTOR PRECURSOR (TRKB TYROSINE

KINASE) (GP145-TRKB) (TRK-B)

Seq ID: 65
Accession: P17840
Swissprot_id: SLS3_BRAOL
Gi_number: 134532
Description: S-locus-specific glycoprotein S13 precursor (SLSG-13)
Seq ID: 67
Accession: P08453
Swissprot_id: GDB2_WHEAT
Gi_number: 121101
Description: GAMMA-GLIADIN PRECURSOR
Seq ID: 69
Accession: Q9S1G2
Swissprot_id: DPO1_RHILE
Gi_number: 12229815
Description: DNA polymerase I (POL I)
Seq ID: 71
Accession: Q99728
Swissprot_id: BAR1_HUMAN
Gi_number: 13123980
Description: BRCA1-ASSOCIATED RING DOMAIN PROTEIN 1 (BARD-1)
Seq ID: 75
Accession: Q09052
Swissprot_id: ACC1_BRAJU
Gi_number: 728780
Description: 1-AMINOCYCLOPROPANE-1-CARBOXYLATE OXIDASE (ACC OXIDASE)

(ETHYLENE-FORMING ENZYME) (EFE)

Seq ID: 77
Accession: Q39760
Swissprot_id: DCS2_GOSAR
Gi_number: 3287834
Description: (+)-delta-cadinene synthase isozyme XC14 (D-cadinene

synthase)

Seq ID: 79
Accession: Q05963
Swissprot_id: FL3H_CALCH
Gi_number: 729503
Description: Naringenin,2-oxoglutarate 3-dioxygenase

(Flavonone-3-hydroxylase) (F3H) (FHT)

Seq ID: 83
Accession: P40267
Swissprot_id: H1_LYCPN
Gi_number: 729668
Description: HISTONE H1
Seq ID: 85
Accession: Q13439
Swissprot_id: GOG4_HUMAN
Gi_number: 12643718
Description: GOLGI AUTOANTIGEN, GOLGIN SUBFAMILY A 4 (TRANS-GOLGI P230)

(256 KDA GOLGIN) (GOLGIN-245) (72.1 PROTEIN)

Seq ID: 87
Accession: P38137
Swissprot_id: FAT2_YEAST
Gi_number: 586339
Description: Peroxisomal-coenzyme A synthetase
Seq ID: 89
Accession: Q9RW10
Swissprot_id: MENG_DEIRA
Gi_number: 17369587
Description: Probable S-adenosylmethionine:2-demethylmenaquinone

methyltransferase

Seq ID: 91
Accession: Q9ZT66
Swissprot_id: E134_MAIZE
Gi_number: 8928122
Description: Endo-1,3;1,4-beta-D-glucanase precursor
Seq ID: 95
Accession: Q15738
Swissprot_id: NSDL_HUMAN
Gi_number: 8488997
Description: AND(P)-DEPENDENT STEROID DEHYDROGENASE (H105E3 PROTEIN)
Seq ID: 99
Accession: O14727
Swissprot_id: APAF_HUMAN
Gi_number: 3023307
Description: Apoptotic protease activating factor 1 (Apaf-1)
Seq ID: 105
Accession: P26170
Swissprot_id: BCHG_RHOCA
Gi_number: 114850
Description: Bacteriochlorophyll synthase 33 kDa chain (Geranylgeranyl

bacteriochlorophyll synthase)

Seq ID: 107
Accession: O22340
Swissprot_id: TSD3_ABIGR
Gi_number: 17367918
Description: (−)-(45)-limonene synthase, chloroplast precursor
Seq ID: 109
Accession: Q05085
Swissprot_id: CHL1_ARATH
Gi_number: 544018
Description: Nitrate/chlorate transporter
Seq ID: 111
Accession: P46086
Swissprot_id: KIME_ARATH
Gi_number: 1170660
Description: Mevalonate kinase (MK)
Seq ID: 113
Accession: O22567
Swissprot_id: CLA1_ORYSA
Gi_number: 3913239
Description: Probable 1-deoxy-D-xylulose 5-phosphate synthase,

chloroplast (1-deoxyxylulose-5-phosphate synthase) (DXP
synthase) (DXPS)

Seq ID: 115
Accession: P48450
Swissprot_id: ERG7_RAT
Gi_number: 1352388
Description: Lanosterol synthase (Oxidosqualene--lanosterol cyclase)

(2,3-epoxysqualene--lanosterol cyclase) (OSC)

Seq ID: 117
Accession: Q06587
Swissprot_id: RNG1_HUMAN
Gi_number: 548733
Description: Polycomb complex protein RING1 (RNF1)
Seq ID: 119
Accession: P04929
Swissprot_id: HRPX_PLALO
Gi_number: 123530
Description: HISTIDINE-RICH GLYCOPROTEIN PRECURSOR
Seq ID: 131
Accession: P52839
Swissprot_id: FSTL_ARATH
Gi_number: 1706917
Description: Flavonol sulfotransferase-like (RaRO47)
Seq ID: 133
Accession: Q9XHL5
Swissprot_id: HMD3_ORYSA
Gi_number: 11133198
Description: 3-hydroxy-3-methylglutaryl-coenzyme A reductase 3 (HMG-CoA

reductase 3)

Seq ID: 135
Accession: Q55087
Swissprot_id: CHLP_SYNY3
Gi_number: 2493698
Description: GERANYLGERANYL HYDROGENASE
Seq ID: 139
Accession: P27806
Swissprot_id: H1_WHEAT
Gi_number: 14916992
Description: Histone H1
Seq ID: 141
Accession: Q96330
Swissprot_id: FLS1_ARATH
Gi_number: 6166164
Description: FLAVONOL SYNTHASE 1 (FLS 1)
Seq ID: 145
Accession: P04323
Swissprot_id: POL3_DROME
Gi_number: 130405
Description: Retrovirus-related Pol polyprotein from transposon 17.6

[Contains: Protease ; Reverse transcriptase ;
Endonuclease]

Seq ID: 147
Accession: Q9ZCV0
Swissprot_id: RL20_RICPR
Gi_number: 6225976
Description: 50S ribosomal protein L20
Seq ID: 149
Accession: O48674
Swissprot_id: HEM1_ORYSA
Gi_number: 3913811
Description: Glutamyl-tRNA reductase, chloroplast precursor (GluTR)
Seq ID: 151
Accession: P28968
Swissprot_id: VGLX_HSVEB
Gi_number: 138350
Description: GLYCOPROTEIN X PRECURSOR
Seq ID: 155
Accession: Q43147
Swissprot_id: CP85_LYCES
Gi_number: 5921933
Description: CYTOCHROME P450 85 (DWARF PROTETN)
Seq ID: 159
Accession: O43791
Swissprot_id: SPOP_HUMAN
Gi_number: 8134708
Description: Speckle-type POZ protein
Seq ID: 161
Accession: P57708
Swissprot_id: ISPF_PSEAE
Gi_number: 12643672
Description: 2C-METHYL-D-ERYTHRITOL 2,4-CYCLODIPHOSPHATE SYNTHASE

(MECPS)

Seq ID: 165
Accession: Q04677
Swissprot_id: THIB_CANTR
Gi_number: 418002
Description: ACETYL-COA ACETYLTRANSFERASE IB (PEROXISOMAL

ACETOACETYL-COA THIOLASE) (THIOLASE IB)

Seq ID: 169
Accession: P53799
Swissprot_id: FDFT_ARATH
Gi_number: 1706772
Description: Farnesyl-diphosphate farnesyltransferase (Squalene

synthetase) (SQS) (SS) (FPP:FPP farnesyltransferase)

Seq ID: 173
Accession: P22503
Swissprot_id: GUN_PHAVU
Gi_number: 1346225
Description: ENDOGLUCANASE PRECURSOR (ENDO-1,4-BETA-GLUCANASE)

(ABSCISSLON CELLULASE)

Seq ID: 179
Accession: Q62598
Swissprot_id: DSPP_RAT
Gi_number: 17865451
Description: Dentin sialophosphoprotein precursor [Contains: Dentin

phosphoprotein (Dentin phosphophoryn) (DPP); Dentin
sialoprotein (DSP)]

Seq ID: 181
Accession: P10978
Swissprot_id: POLX_TOBAC
Gi_number: 130582
Description: Retrovirus-related Pol polyprotein from transposon TNT

1-94 [Contains: Protease ; Reverse transcriptase;
Endonuclease]

Seq ID: 183
Accession: P14328
Swissprot_id: SP96_DICDI
Gi_number: 134780
Description: SPORE COAT PROTEIN SP96
Seq ID: 185
Accession: P04323
Swissprot_id: POL3_DROME
Gi_number: 130405
Description: Retrovirus-related Pol polyprotein from transposon 17.6

[Contains: Protease ; Reverse transcriptase ;
Endonuclease]

Seq ID: 189
Accession: Q9LX33
Swissprot_id: PFTA_ARATH
Gi_number: 12643807
Description: Protein farnesyltransferase alpha subunit (CAAX

farnesyltransferase alpha subunit) (RAS proteins
prenyltransferase alpha) (FTase-alpha)

Seq ID: 191
Accession: Q9WTV7
Swissprot_id: RNFB_MOUSE
Gi_number: 13124535
Description: RING FINGER PROTEIN 12 (LIM DOMAIN INTERACTING RING FINGER

PROTEIN) (RING FINGER LIM DOMAIN-BINDING PROTEIN) (R-LIM)

Seq ID: 193
Accession: Q05001
Swissprot_id: NCPR_CATRO
Gi_number: 730125
Description: NADPH-cytochrome P450 reductase (CPR) (P450R)
Seq ID: 197
Accession: P52835
Swissprot_id: F3ST_FLABI
Gi_number: 1706738
Description: FLAVONOL 3-SULFOTRANSFERASE (F3-ST)
Seq ID: 205
Accession: P11675
Swissprot_id: IE18_PRVIF
Gi_number: 124178
Description: IMMEDIATE-EARLY PROTEIN IE180
Seq ID: 207
Accession: Q912W7
Swissprot_id: MENG_PSEAE
Gi_number: 17369015
Description: S-adenosylmethionine:2-demethylmenaquinone

methyltransferase

Seq ID: 211
Accession: P36940
Swissprot_id: FASL_RAT
Gi_number: 544277
Description: FAS ANTIGEN LIGAND
Seq ID: 213
Accession: Q9Z5D6
Swissprot_id: BCHG_RHOSH
Gi_number: 13878356
Description: Bacteriochlorophyll synthase 33 kDa chain (Geranylgeranyl

bacteriochlorophyll synthase)

Seq ID: 215
Accession: P47735
Swissprot_id: RLK5_ARATH
Gi_number: 1350783
Description: Receptor-like protein kinase 5 precursor
Seq ID: 217
Accession: P11369
Swissprot_id: POL2_MOUSE
Gi_number: 130402
Description: Retrovirus-related POL polyprotein [Contains: Reverse

transcriptase ; Endonuclease]

Seq ID: 219
Accession: Q15800
Swissprot_id: ER25_HUMAN
Gi_number: 2498340
Description: C-4 methyl sterol oxidase
Seq ID: 221
Accession: Q9LTI3
Swissprot_id: MPU1_ARATH
Gi_number: 12644539
Description: Mannose-P-dolichol utilization defect 1 protein homolog
Seq ID: 227
Accession: P33485
Swissprot_id: VNUA_PRVKA
Gi_number: 465445
Description: PROBABLE NUCLEAR ANTIGEN
Seq ID: 229
Accession: P08640
Swissprot_id: AMYH_YEAST
Gi_number: 728850
Description: GLUCOAMYLASE S1/S2 PRECURSOR (GLUCAN

1,4-ALPHA-GLUCOSIDASE) (1,4-ALPHA-D-GLUCAN GLUCOHYDROLASE)

Seq ID: 235
Accession: P16157
Swissprot_id: ANK1_HUMAN
Gi_number: 113884
Description: Ankyrin 1 (Erythrocyte ankyrin) (Ankyrin R)
Seq ID: 239
Accession: Q9ZCP3
Swissprot_id: UBIE_RICPR
Gi_number: 6647890
Description: Probable ubiqumone/menaquinone biosynthesis

methyltransferase UBIE

Seq ID: 241
Accession: Q9S1G2
Swissprot_id: DPO1_RHILE
Gi_number: 12229815
Description: DNA polymerase I (POL I)
Seq ID: 243
Accession: O23051
Swissprot_id: C883_ARATH
Gi_number: 5915848
Description: Cytochrome P450 88A3
Seq ID: 245
Accession: Q06548
Swissprot_id: APKA_ARATH
Gi_number: 1168470
Description: Protein kinase APK1A
Seq ID: 247
Accession: P46604
Swissprot_id: HT22_ARATH
Gi_number: 1170409
Description: Homeobox-leucine zipper protein HAT22 (HD-ZIP protein 22)
Seq ID: 249
Accession: O49853
Swissprot_id: DCS4_GOSAR
Gi_number: 3287826
Description: (+)-delta-cadinene synthase isozyme C2 (D-cadinene

synthase)

Seq ID: 251
Accession: O14321
Swissprot_id: ERG6_SCHPO
Gi_number: 6166151
Description: PROBABLE DELTA(24)-STEROL C-METHYLTRANSFERASE
Seq ID: 253
Accession: P17816
Swissprot_id: GRP_HORVU
Gi_number: 121644
Description: GLYCINE-RICH CELL WALL STRUCTURAL PROTEIN PRECURSOR
Seq ID: 255
Accession: Q9P2Y4
Swissprot_id: Z219_HUMAN
Gi_number: 12230861
Description: Zinc finger protein 219
Seq ID: 257
Accession: P53683
Swissprot_id: CDP2_ORYSA
Gi_number: 1705734
Description: Calcium-dependent protein kinase, isoform 2 (CDPK 2)
Seq ID: 259
Accession: O60610
Swissprot_id: DIA1_HUMAN
Gi_number: 6225268
Description: DIAPHANOUS PROTEIN HOMOLOG 1 (DIAPHANOUS-RELATED FORMIN 1)

(DRF1)

Seq ID: 261
Accession: P93163
Swissprot_id: GBA2_SOYBN
Gi_number: 3913724
Description: Guanine nucleotide-binding protein alpha-2 subunit

(GP-alpha-2)

Seq ID: 263
Accession: P82094
Swissprot_id: TMF1_HUMAN
Gi_number: 8134736
Description: TATA element modulatory factor (TMF)
Seq ID: 265
Accession: P49353
Swissprot_id: FPPS_MAIZE
Gi_number: 1346033
Description: Famesyl pyrophosphate synthetase (FPP synthetase) (FPS)

(Farnesyl diphosphate synthetase) [Includes:
Dimethylallyltransferase ; Geranyltranstransferase]

Seq ID: 267
Accession: Q9XFS9
Swissprot_id: DXR_ARATH
Gi_number: 12644032
Description: 1-deoxy-D-xylulose 5-phosphate reductoisomerase,

chloroplast precursor (DXP reductoisomerase)
(1-deoxyxylulose-5-phosphate reductoisomerase)

Seq ID: 271
Accession: P28968
Swissprot_id: VGLX_HSVEB
Gi_number: 138350
Description: GLYCOPROTEIN X PRECURSOR
Seq ID: 273
Accession: P35579
Swissprot_id: MYH9_HUMAN
Gi_number: 6166599
Description: Myosin heavy chain, nonmuscle type A (Cellular myosin

heavy chain, type A) (Nonmuscle myosin heavy chain-A)
(NMMHC-A)

Seq ID: 275
Accession: P03211
Swissprot_id: EBN1_EBV
Gi_number: 119110
Description: EBNA-1 NUCLEAR PROTEIN
Seq ID: 277
Accession: P14284
Swissprot_id: DPOZ_YEAST
Gi_number: 118901
Description: DNA polymerase zeta catalytic subunit
Seq ID: 279
Accession: Q02817
Swissprot_id: MUC2_HUMAN
Gi_number: 2506877
Description: MUCIN 2 PRECURSOR (INTESTINAL MUCIN 2)
Seq ID: 283
Accession: Q9UQ13
Swissprot_id: SHO2_HUMAN
Gi_number: 14423936
Description: LEUCINE-RICH REPEAT PROTEIN SHOC-2 (RAS-BINDING PROTEIN

SUR-8)

Seq ID: 285
Accession: Q912W7
Swissprot_id: MENG_PSEAE
Gi_number: 17369015
Description: S-adenosylmethionine:2-demethylmenaquinone

methyltransferase

Seq ID: 287
Accession: P50860
Swissprot_id: ERG3_CANGA
Gi_number: 1706691
Description: C-5 sterol desaturase (Sterol-C5-desaturase)
Seq ID: 289
Accession: P16970
Swissprot_id: ABD3_RAT
Gi_number: 130359
Description: ATP-binding cassette, sub-family D, member 3 (70 kDa

peroxisomal membrane protein) (PMP70)

Seq ID: 291
Accession: P07237
Swissprot_id: PDI_HUMAN
Gi_number: 2507460
Description: PROTEIN DISULFIDE ISOMERASE PRECURSOR (PDI) (PROLYL

4-HYDROXYLASE BETA SUBUNIT) (CELLULAR THYROID HORMONE
BINDING PROTEIN) (P55)

Seq ID: 293
Accession: Q62967
Swissprot_id: ER19_RAT
Gi_number: 2498339
Description: Diphosphomevalonate decarboxylase (Mevalonate

pyrophosphate decarboxylase) (Mevalonate
(diphospho)decarboxylase)

Seq ID: 297
Accession: P10967
Swissprot_id: ACC3_LYCES
Gi_number: 119640
Description: 1-AMINOCYCLOPROPANE-1-CARBOXYLATE OXIDASE HOMOLOG (PROTEIN

E8)

Seq ID: 299
Accession: P40603
Swissprot_id: APG_BRANA
Gi_number: 728868
Description: ANTER-SPECIFIC PROLINE-RICH PROTEIN APG (PROTEIN CEX)
Seq ID: 301
Accession: P08640
Swissprot_id: AMYH_YEAST
Gi_number: 728850
Description: GLUCOAMYLASE S1/S2 PRECURSOR (GLUCAN

1,4-ALPHA-GLUCOSIDASE) (1,4-ALPHA-D-GLUCAN GLUCOHYDROLASE)

Seq ID: 303
Accession: Q28092
Swissprot_id: CYL2_BOVIN
Gi_number: 2498277
Description: CYLICIN II (MULTIPLE-BAND POLYPEPTIDE II)
Seq ID: 307
Accession: P46573
Swissprot_id: APKB_ARATH
Gi_number: 12644274
Description: PROTEIN KINASE APK1B
Seq ID: 309
Accession: Q05654
Swissprot_id: RDPO_SCHPO
Gi_number: 1710054
Description: RETROTRANSPOSABLE ELEMENT TF2 155 KDA PROTEIN
Seq ID: 311
Accession: Q05609
Swissprot_id: CTR1_ARATH
Gi_number: 1169128
Description: Serine/threonine-protein kinase CTR1
Seq ID: 313
Accession: P47989
Swissprot_id: XDH_HUMAN
Gi_number: 2506326
Description: XANTHINE DEHYDROGENASE/OXIDASE [INCLUDES: XANTHINE

DEHYDROGENASE (XD); XANTHINE OXIDASE (XO) (XANTHINE
OXIDOREDUCTASE)]

Seq ID: 315
Accession: P54873
Swissprot_id: HMCS_ARATH
Gi_number: 1708236
Description: HYDROXYMETHYLGLUTARYL-COA SYNTHASE (HMG-COA SYNTHASE)

(3-HYDROXY-3-METHYLGLUTARYL COENZYME A SYNTHASE)

Seq ID: 317
Accession: Q9SSU8
Swissprot_id: PSY_DAUCA
Gi_number: 8928282
Description: Phytoene synthase, chloroplast precursor
Seq ID: 319
Accession: Q9U7E0
Swissprot_id: ATRX_CAEEL
Gi_number: 17367114
Description: Transcriptional regulator ATRX homolog (X-linked nuclear

protein-1)

Seq ID: 321
Accession: P51617
Swissprot_id: IRA1_HUMAN
Gi_number: 8928535
Description: Interleukin-1 receptor-associated kinase 1 (IRAK-1)
Seq ID: 327
Accession: P10978
Swissprot_id: POLX_TOBAC
Gi_number: 130582
Description: Retrovirus-related Pol polyprotein from transposon TNT

1-94 [Contains: Protease ; Reverse transcriptase ;
Endonuclease]

Seq ID: 329
Accession: P52837
Swissprot_id: F4ST_FLACH
Gi_number: 1706740
Description: FLAVONOL 4′-SULFOTRANSFERASE (F4-ST)
Seq ID: 333
Accession: Q39085
Swissprot_id: DIM_ARATH
Gi_number: 17380361
Description: Cell elongation protein DIMINUTO (Cell elongation protein

Dwarf1)

Seq ID: 335
Accession: O81220
Swissprot_id: DCUP_MAIZE
Gi_number: 6014938
Description: Uroporphyrinogen decarboxylase, chloroplast precursor

(UPD)

Seq ID: 341
Accession: P50172
Swissprot_id: DHI1_MOUSE
Gi_number: 1706408
Description: Corticosteroid 11-beta-dehydrogenase, isozyme 1 (11-DH)

(11-beta-hydroxysteroid dehydrogenase 1) (11-beta-HSD1)
(11beta-HSD1A)

Seq ID: 343
Accession: P53611
Swissprot_id: PGTB_HUMAN
Gi_number: 2506788
Description: GERANYLGERANYL TRANSFERASE TYPE II BETA SUBUNIT (RAB
GERANYLGERANYLTRANSFERASE BETA SUBUNIT) (RAB
GERANYL-GERANYLTRANSFERASE BETA SUBUNIT) (RAB GG
TRANSFERASE BETA) (RAB GGTASE BETA)
Seq ID: 345
Accession: Q02629
Swissprot_id: N100_YEAST
Gi_number: 400320
Description: NUCLEOPORIN NUP100/NSP100 (NUCLEAR PORE PROTEIN

NUP100/NSP100)

Seq ID: 347
Accession: P43216
Swissprot_id: MPH1_HOLLA
Gi_number: 1171005
Description: MAJOR POLLEN ALLERGEN HOL L 1 PRECURSOR (HOL L I) (HOL L

1.0101 AND 1.0102)

Seq ID: 349
Accession: P46573
Swissprot_id: APKB_ARATH
Gi_number: 12644274
Description: PROTEIN KINASE APK1B
Seq ID: 353
Accession: P48019
Swissprot_id: HMD1_ORYSA
Gi_number: 1346301
Description: 3-hydroxy-3-methylglutaryl-coenzyme A reductase (HMG-CoA

reductase)

Seq ID: 357
Accession: Q39760
Swissprot_id: DCS2_GOSAR
Gi_number: 3287834
Description: (+)-delta-cadinene synthase isozyme XC14 (D-cadinene

synthase)

Seq ID: 359
Accession: O64411
Swissprot_id: PAO_MAIZE
Gi_number: 6225822
Description: Polyamine oxidase precursor
Seq ID: 361
Accession: P38605
Swissprot_id: CAS1_ARATH
Gi_number: 584882
Description: CYCLOARTENOL SYNTHASE (2,3-EPOXYSQUALENE--CYCLOARTENOL

CYCLASE)

Seq ID: 363
Accession: P13728
Swissprot_id: SGS3_DROYA
Gi_number: 134469
Description: Salivary glue protein SGS-3 precursor
Seq ID: 365
Accession: Q62967
Swissprot_id: ER19_RAT
Gi_number: 2498339
Description: Diphosphomevalonate decarboxylase (Mevalonate

pyrophosphate decarboxylase) (Mevalonate
(diphospho)decarboxylase)

Seq ID: 375
Accession: Q9NZ52
Swissprot_id: GGA3_HUMAN
Gi_number: 14548064
Description: ADP-RIBOSYLATION FACTOR BINDING PROTEIN GGA3

(GOLGI-LOCALIZED, GAMMA EAR-CONTAINING, ARF-BINDING
PROTEIN 3)

Seq ID: 379
Accession: P52835
Swissprot_id: F3ST_FLABI
Gi_number: 1706738
Description: FLAVONOL 3-SULFOTRANSFERASE (F3-ST)
Seq ID: 381
Accession: P91428
Swissprot_id: COQ4_CAEEL
Gi_number: 3121872
Description: UBIQUINONE BIOSYNTHESIS PROTEIN COQ4 HOMOLOG
Seq ID: 383
Accession: Q9ZTP4
Swissprot_id: ZDS_MAIZE
Gi_number: 17367864
Description: Zeta-carotene desaturase, chloroplast precursor (Carotene

7,8-desaturase)

Seq ID: 391
Accession: P54980
Swissprot_id: CRTI_RHOSH
Gi_number: 1706146
Description: Phytoene dehydrogenase (Phytoene desaturase)
Seq ID: 392
Accession: P54980
Swissprot_id: CRTI_RHOSH
Gi_number: 1706146
Description: Phytoene dehydrogenase (Phytoene desaturase)
Seq ID: 393
Accession: Q912W7
Swissprot_id: MENG_PSEAE
Gi_number: 17369015
Description: 5-adenosylmethionine:2-demethylmenaquinone

methyltransferase

Seq ID: 397
Accession: Q01332
Swissprot_id: CRTZ_ERWHE
Gi_number: 231913
Description: BETA-CAROTENE HYDROXYLASE
Seq ID: 398
Accession: Q01332
Swissprot_id: CRTZ_ERWHE
Gi_number: 231913
Description: BETA-CAROTENE HYDROXYLASE
Seq ID: 399
Accession: Q9ZWQ9
Swissprot_id: FLS_CITUN
Gi_number: 14916566
Description: Flavonol synthase (FLS) (CitFLS)
Seq ID: 400
Accession: Q9ZWQ9
Swissprot_id: FLS_CITUN
Gi_number: 14916566
Description: Flavonol synthase (FLS) (CitFLS)
Seq ID: 401
Accession: Q42525
Swissprot_id: HXK1_ARATH
Gi_number: 12644433
Description: HEXOKINASE 1

[0624] In light of the detailed description of the invention and the examples presented above, it can be appreciated that the several aspects of the invention are achieved.

[0625] It is to be understood that the present invention has been described in detail by way of illustration and example in order to acquaint others skilled in the art with the invention, its principles, and its practical application. Particular formulations and processes of the present invention are not limited to the descriptions of the specific embodiments presented, but rather the descriptions and examples should be viewed in terms of the claims that follow and their equivalents. While some of the examples and descriptions above include some conclusions about the way the invention may function, the inventors do not intend to be bound by those conclusions and functions, but put them forth only as possible explanations.

[0626] It is to be further understood that the specific embodiments of the present invention as set forth are not intended as being exhaustive or limiting of the invention, and that many alternatives, modifications, and variations will be apparent to those of ordinary skill in the art in light of the foregoing examples and detailed description. Accordingly, this invention is intended to embrace all such alternatives, modifications, and variations that fall within the spirit and scope of the following claims.

What is claimed is:

1. An isolated polynucleotide comprising nucleotide sequence encoding a polypeptide involved in or associated with the biosynthesis of isoprenoids in a plant, wherein said nucleotide sequence comprises
a) a nucleotide sequence selected from the group consisting of SEQ ID NO 1, 3, 5, 7, 9, 11, 13, 15, 17, 19, 21, 23, 25, 27, 28, 29, 31, 33, 35, 37, 39, 41, 43, 45, 47, 49, 51, 53, 55, 57, 59, 61, 63, 65, 67, 69, 71, 73, 75, 77, 79, 81, 83, 85, 87, 89, 91, 93, 95, 97, 99, 101, 103, 105, 107, 109, 111, 113, 115, 117, 119, 121, 123, 125, 127, 129, 131, 133, 135, 137, 139, 141, 143, 145, 147, 149, 151, 153, 155, 157, 159, 161, 163, 165, 167, 169, 171, 173, 175, 177, 179, 181, 183, 185, 187, 189, 191, 193, 195, 197, 199, 201, 203, 205, 207, 209, 211, 213, 215, 217, 219, 221, 223, 225, 227, 229, 231, 233, 235, 237, 239, 241, 243, 245, 247, 249, 251, 253, 255, 257, 259, 261, 263, 265, 267, 269, 271, 273, 275, 277, 279, 281, 283, 285, 287, 289, 291, 293, 295, 297, 299, 301, 303, 305, 307, 309, 311, 313, 315, 317, 319, 321, 323, 325, 327, 329, 331, 333, 335, 337, 339, 341, 343, 345, 347, 349, 351, 353, 355, 357, 359, 361, 363, 365, 367, 369, 371, 373, 375, 377, 379, 381, 383, 385, 387, 389, 391, 393, 395, 397, 399, 401, 403, 405, 407, 409, 411, and 413;
b) a nucleotide sequence substantially similar to a nucleotide sequence of a);
c) a nucleotide sequence of at least 15 nucleotides in length that hybridizes with a nucleotide sequence of a) or the complement thereof under stringent conditions.
d) a fragment of a nucleotide sequence of a) wherein said fragment encodes a polypeptide involved in or associated with the biosynthesis of isoprenoids in a plant;
e) a nucleotide sequence complementary to a nucleotide sequence of a), b) or c); or
f) a nucleotide sequence comprising a reverse complement to a nucleotide sequence of a), b) or c).

2. An isolated polynucleotide comprising a nucleotide sequence that is at least 90% identical to the nucleotide sequence of claim 1.

3. An isolated polynucleotide comprising nucleotide sequence encoding a polypeptide involved in or associated with the biosynthesis of isoprenoids in a plant, wherein said polypeptide comprises an amino acid sequence selected from the group consisting of SEQ ID NO 2, 4, 6, 8, 10, 12, 14, 16, 18, 20, 22, 24, 26, 28, 30, 32, 34, 36, 38, 40, 42, 44, 46, 48, 50, 52, 54, 56, 58, 60, 62, 64, 66, 68, 70, 72, 74, 76, 78, 80, 82, 84, 86, 88, 90, 92, 94, 96, 98, 100, 102, 104, 106, 108, 110, 112, 114, 116, 118, 120, 122, 124, 126, 128, 130, 132, 314, 136, 138, 140, 142, 144, 146, 148, 150, 152, 154, 156, 158, 160, 162, 164, 166, 168, 170, 172, 174, 176, 178, 180, 182, 184, 186, 188, 190, 192, 194, 196, 198, 200, 202, 204, 206, 208, 210, 212, 214, 216, 218, 220, 222, 224, 226, 228, 230, 232, 234, 236, 238, 240, 242, 244, 246, 248, 250, 252, 254, 256, 258, 260, 262, 264, 266, 268, 270, 272, 274, 276, 278, 280, 282, 284, 286, 288, 290, 292, 294, 296, 298, 300, 302, 304, 306, 308, 310, 312, 314, 316, 318, 320, 322, 324, 326, 328, 330, 332, 334, 336, 338, 340, 342, 344, 346, 348, 350, 352, 354, 356, 358, 360, 362, 364, 366, 368, 370, 372, 374, 376, 378, 380, 382, 384, 386, 388, 390, 392, 394, 396, 398, 400, 402, 404, 406, 408, 410, 412 and 414.

4. An isolated polypeptide involved in or associated with the biosynthesis of isoprenoids in a plant, comprising an amino acid sequence selected from the group consisting of SEQ ID NO 2, 4, 6, 8, 10, 12, 14, 16, 18, 20, 22, 24, 26, 28, 30, 32, 34, 36, 38, 40, 42, 44, 46, 48, 50, 52, 54, 56, 58, 60, 62, 64, 66, 68, 70, 72, 74, 76, 78, 80, 82, 84, 86, 88, 90, 92, 94, 96, 98, 100, 102, 104, 106, 108, 110, 112, 114, 116, 118, 120, 122, 124, 126, 128, 130, 132, 314, 136, 138, 140, 142, 144, 146, 148, 150, 152, 154, 156, 158, 160, 162, 164, 166, 168, 170, 172, 174, 176, 178, 180, 182, 184, 186, 188, 190, 192, 194, 196, 198, 200, 202, 204, 206, 208, 210, 212, 214, 216, 218, 220, 222, 224, 226, 228, 230, 232, 234, 236, 238, 240, 242, 244, 246, 248, 250, 252, 254, 256, 258, 260, 262, 264, 266, 268, 270, 272, 274, 276, 278, 280, 282, 284, 286, 288, 290, 292, 294, 296, 298, 300, 302, 304, 306, 308, 310, 312, 314, 316, 318, 320, 322, 324, 326, 328, 330, 332, 334, 336, 338, 340, 342, 344, 346, 348, 350, 352, 354, 356, 358, 360, 362, 364, 366, 368, 370, 372, 374, 376, 378, 380, 382, 384, 386, 388, 390, 392, 394, 396, 398, 400, 402, 404, 406, 408, 410, 412 and 414.

5. An isolated polypeptide comprising an amino acid sequence substantially similar to the amino acid sequence of the polypeptide of claim 4.

6. An isolated polynucleotide comprising a nucleotide sequence or fragment thereof encoding a polypeptide involved in or associated with the biosynthesis of isopentenyl diphosphate (IPP) and dimethylallyl alcohol (DMAPP) in a plant said nucleotide sequence selected from the group consisting of SEQ ID NO 99, 113, 153, 161, 267 and 413.

7. An isolated polynucleotide comprising a nucleotide sequence substantially similar to the nucleotide sequence of the polynucleotide of claim 6.

8. An expression cassette comprising the polynucleotide of claim 6.

9. A host cell comprising the expression cassette of claim 8.

10. A transgenic plant comprising the expression cassette of claim 8.

11. An isolated polynucleotide comprising a nucleotide sequence encoding a polypeptide involved in or associated with the biosynthesis of isopentenyl diphosphate (IPP) and dimethylallyl alcohol (DMAPP) in a plant, said polypeptide comprising an amino acid sequence selected from the group consisting of SEQ ID NO 100, 114, 154, 162, 268 and 414.

12. An expression cassette comprising the polynucleotide of claim 11.

13. A host cell comprising the expression cassette of claim 12.

14. A transgenic plant comprising the expression cassette of claim 12.

15. An isolated polynucleotide comprising a nucleotide sequence or fragment thereof encoding a polypeptide with enzymatic activity involved in or associated with the biosynthesis of short-chain plastid prenyltransferases, said nucleotide sequence selected from the group consisting of SEQ ID NO 11, 47, 83, 125, 135, 229, 235, 243, 265, 299, 345, 371, 409 and 411.

16. An isolated polynucleotide comprising a nucleotide sequence substantially similar to the nucleotide sequence of the polynucleotide of claim 15.

17. An expression cassette comprising the polynucleotide of claim 15.

18. A host cell comprising the expression cassette of claim 17.

19. A transgenic plant comprising the expression cassette of claim 17.

20. An isolated polynucleotide comprising a nucleotide sequence encoding a polypeptide with enzymatic activity involved in or associated with the biosynthesis of short-chain plastid prenyltransferases said polypeptide comprising an amino acid sequence selected from the group consisting of SEQ ID NO 12, 48, 84, 126, 136, 230, 236, 244, 266, 300, 346, 372, 410 and 412.

21. An expression cassette comprising the polynucleotide of claim 20.

22. A host cell comprising the expression cassette of claim 21.

23. A transgenic plant comprising the expression cassette of claim 21.

24. An isolated polynucleotide comprising a nucleotide sequence or fragment thereof encoding a polypeptide the activity of which is involved in or associated with the biosynthesis of gibberellins in plants, said nucleotide sequence selected from the group consisting of SEQ ID NO 25, 67, 75, 79, 97, 107, 141, 155, 173, 193, 203, 205, 223, 225, 253, 259, 261, 291, 297, 349, 359, 375, 377, and 399.

25. An isolated polynucleotide comprising a nucleotide sequence substantially similar to the nucleotide sequence of the polynucleotide of claim 24.

26. An expression cassette comprising the polynucleotide of claim 24.

27. A host cell comprising the expression cassette of claim 26.

28. A transgenic plant comprising the expression cassette of claim 26.

29. An isolated polynucleotide comprising a nucleotide sequence encoding a polypeptide the activity of which is involved in or associated with the biosynthesis of gibberellins in plants, said polypeptide comprising an amino acid sequence selected from the group consisting of SEQ ID NO 26, 68, 76, 80, 98, 108, 142, 156, 174, 194, 204, 206, 224, 226, 254, 260, 262, 292, 298, 350, 360, 376, 378, and 400.

30. An expression cassette comprising the polynucleotide of claim 29.

31. A host cell comprising the expression cassette of claim 30.

32. A transgenic plant comprising the expression cassette of claim 30.

33. An isolated polynucleotide comprising a nucleotide sequence or fragment thereof encoding a polypeptide which exhibits enzymatic activity involved in or associated with the biosynthesis of carotenoids and/or abscisic acids in plants, said nucleotide sequence selected from the group consisting of SEQ ID NO 27, 89, 103, 121, 205, 237, 245, 271, 275, 301, 313, 317, 383, 391, 395, 397 and 407.

34. An isolated polynucleotide comprising a nucleotide sequence substantially similar to the nucleotide sequence of the polynucleotide of claim 33.

35. An expression cassette comprising the polynucleotide of claim 33.

36. A host cell comprising the expression cassette of claim 35.

37. A transgenic plant comprising the expression cassette of claim 35.

38. An isolated polynucleotide comprising a nucleotide sequence encoding a polypeptide which exhibits enzymatic activity involved in or associated with the biosynthesis of carotenoids and/or abscisic acids in plants, said polypeptide comprising an amino acid sequence selected from the group consisting of SEQ ID NO 28, 90, 104, 122, 206, 238, 246, 272, 276, 302, 314, 318, 384, 392, 396, 398 and 408.

39. An expression cassette comprising the polynucleotide of claim 38.

40. A host cell comprising the expression cassette of claim 39.

41. A transgenic plant comprising the expression cassette of claim 39.

42. An isolated polynucleotide comprising a nucleotide sequence or fragment thereof encoding a polypeptide which has enzymatic activity involved in or associated with the biosynthesis of tocopherols in plants, said nucleotide sequence selected from the group consisting of SEQ ID NO 89 and 275.

43. An isolated polynucleotide comprising a nucleotide sequence substantially similar to the nucleotide sequence of the polynucleotide of claim 42.

44. An expression cassette comprising the polynucleotide of claim 42.

45. A host cell comprising the expression cassette of claim 44.

46. A transgenic plant comprising the expression cassette of claim 44.

47. A isolated polynucleotide comprising a nucleotide sequence encoding a polypeptide which has enzymatic activity involved in or associated with the biosynthesis of tocopherols in plants, said polypeptide comprising an amino acid sequence selected from the group consisting of SEQ ID NO 90 and 276.

48. An expression cassette comprising the polynucleotide of claim 47.

49. A host cell comprising the expression cassette of claim 48.

50. A transgenic plant comprising the expression cassette of claim 48.

51. An isolated polynucleotide comprising a nucleotide sequence or fragment thereof encoding a polypeptide with enzymatic activity involved in or associated with plastoquinone and/or phylloquinone biosynthesis in a plant, said nucleotide sequence selected from the group consisting of SEQ ID NO 17, 29, 85, 87, 89, 207, 213, 285, 393, 401.

52. An isolated polynucleotide comprising a nucleotide sequence substantially similar to the nucleotide sequence of the polynucleotide of claim 51.

53. An expression cassette comprising the nucleotide sequence of claim 51.

54. A host cell comprising the expression cassette of claim 53.

55. A transgenic plant comprising the expression cassette of claim 53.

56. An isolated polynucleotide comprising a nucleotide sequence encoding a polypeptide with enzymatic activity involved in or associated with plastoquinone and/or phylloquinone biosynthesis in a plant, said polypeptide comprising an amino acid sequence selected from the group consisting of SEQ ID NO 18, 30, 86, 88, 90, 208, 214, 286, 394, 402.

57. An expression cassette comprising the polynucleotide of claim 56.

58. A host cell comprising the expression cassette of claim 57.

59. A transgenic plant comprising the expression cassette of claim 57.

60. An isolated polynucleotide comprising a nucleotide sequence or fragment thereof encoding a polypeptide with enzymatic activity involved in or associated with the mevalonate pathway in plants, said nucleotide sequence selected from the group consisting of SEQ ID NO 111, 133, 165, 293, 315, 353, 365.

61. An isolated polynucleotide comprising a nucleotide sequence substantially similar to the nucleotide sequence of the polynucleotide of claim 60.

62. An expression cassette comprising the polynucleotide of claim 60.

63. A host cell comprising the expression cassette of claim 62.

64. A transgenic plant comprising the expression cassette of claim 62.

65. An isolated polynucleotide comprising a nucleotide sequence encoding a polypeptide with enzymatic activity involved in or associated with the mevalonate pathway in plants, said polypeptide comprising an amino acid sequence selected from the group consisting of SEQ ID NO 112, 134, 166, 294, 316, 354, 366.

66. An expression cassette comprising the polynucleotide of claim 65.

67. A host cell comprising the expression cassette of claim 66.

68. A transgenic plant comprising the expression cassette of claim 66.

69. An isolated polypeptide comprising a nucleotide sequence or a fragment thereof encoding a polypeptide with enzymatic activity involved in or associated with phytosterol and brassinosteroid metabolism in a plant, said nucleotide sequence selected from the group consisting of SEQ ID NO 3, 5, 13, 15, 21, 33, 35, 37, 45, 49, 59, 61, 65, 91, 95, 119, 123, 131, 147, 163, 169, 173, 183, 187, 195, 197, 219, 251, 269, 287, 303, 309, 311, 323, 329, 331, 333, 337, 341, 361, 367, 379, 389, and 405.

70. An isolated polypeptide comprising a nucleotide sequence substantially similar to the nucleotide sequence of the polynucleotide of claim 69.

71. An expression cassette comprising the polynucleotide of claim 69.

72. A host cell comprising the expression cassette of claim 71.

73. A transgenic plant comprising the expression cassette of claim 71.

74. An isolated polypeptide comprising a nucleotide sequence encoding a polypeptide with enzymatic activity involved in or associated with phytosterol and brassinosteroid metabolism in a plant, said polypeptide comprising an amino acid sequence selected from the group consisting of SEQ ID NO 4, 6, 14, 16, 22, 34, 36, 38, 46, 50, 60, 62, 66, 92, 96, 120, 124, 132, 148, 164, 170, 174, 184, 188, 196, 198, 220, 252, 270, 288, 304, 310, 312, 324, 330, 332, 334, 338, 342, 362, 368, 380, 390, and 406.

75. A expression cassette comprising the polynucleotide of claim 74.

76. A host cell comprising the expression cassette of claim 75.

77. A transgenic plant comprising the expression cassette of claim 75.

78. An isolated polypeptide comprising a nucleotide sequence or fragment thereof encoding a polypeptide with activity involved in or associated with biosynthesis of ubiquinone in a plant said nucleotide sequence selected from the group consisting of SEQ ID NO 7, 239 and 381.

79. An isolated polypeptide comprising a nucleotide sequence substantially similar to the nucleotide sequence of the polynucleotide of claim 78.

80. An expression cassette comprising the polynucleotide of claim 78.

81. A host cell comprising the expression cassette of claim 80.

82. A transgenic plant comprising the expression cassette of claim 81.

83. An isolated polypeptide comprising a nucleotide sequence encoding a polypeptide with activity involved in or associated with biosynthesis of ubiquinone in a plant said polypeptide comprising an amino acid sequence selected from the group consisting of SEQ ID NO 8, 240 and 382.

84. An expression cassette comprising the polynucleotide of claim 83.

85. A host cell comprising the expression cassette of claim 84.

86. A transgenic plant comprising the expression cassette of claim 84.

87. An isolated polynucleotide comprising a nucleotide sequence or fragment thereof encoding a polypeptide with activity involved in or associated with the biosynthesis of monterpenes and sesquiterpenes in a plant, said polynucleotide comprising a nucleotide sequence selected from the group consisting of SEQ ID NO 1, 9, 19, 39, 41, 43, 51, 55, 57, 69, 71, 77, 81, 99, 101, 109, 115, 129, 137, 145, 151, 157, 159, 167, 171, 179, 181, 185, 201, 209, 211, 217, 227, 231, 233, 241, 247, 249, 257, 263, 273, 279, 281, 283, 305, 319, 321, 327, 347, 351, 357, 369, 375, 385, 387 and 403.

88. An isolated polynucleotide comprising a nucleotide sequence substantially similar to the nucleotide sequence of the polynucleotide of claim 87.

89. An expression cassette comprising the polynucleotide of claim 87.

90. A host cell comprising the expression cassette of claim 89.

91. A transgenic plant comprising the expression cassette of claim 89.

92. An isolated polynucleotide comprising a nucleotide sequence encoding a polypeptide with activity involved in or associated with the biosynthesis of monterpenes and sesquiterpenes in a plant, said polypeptide comprising an amino acid sequence selected from the group consisting of SEQ ID NO 2, 10, 20, 40, 42, 44, 52, 56, 58, 70, 72, 78, 82, 100, 102, 110, 116, 130, 138, 146, 152, 158, 160, 168, 172, 180, 182, 186, 202, 210, 212, 218, 228, 232, 234, 242, 248, 250, 258, 264, 274, 280, 282, 284, 306, 320, 322, 328, 348, 352, 358, 370, 376, 386, 388 and 404.

93. An expression cassette comprising the polynucleotide of claim 92.

94. A host cell comprising the expression cassette of claim 93.

95. A transgenic plant comprising the expression cassette of claim 93.

96. An isolated polynucleotide comprising a nucleotide sequence or fragment thereof encoding a polypeptide that is involved in or associated with protein prenylation, said nucleotide sequence selected from the group consisting of SEQ ID NO 23, 63, 189, 255, 289, 343, and 373.

97. An isolated polynucleotide comprising a nucleotide sequence substantially similar to the nucleotide sequence of the polynucleotide of claim 96.

98. An expression cassette comprising the polynucleotide of claim 96.

99. A host cell comprising the expression cassette of claim 98.

100. A transgenic plant comprising the expression cassette of claim 98.

101. An isolated polynucleotide comprising a nucleotide sequence encoding a polypeptide that is involved in or associated with protein prenylation, said polypeptide comprising an amino acid sequence selected from the group consisting of SEQ ID NO 24, 64, 190, 256, 290, 344, and 374.

102. An expression cassette comprising the polynucleotide of claim 101.

103. A host cell comprising the expression cassette of claim 102.

104. A transgenic plant comprising the expression cassette of claim 102.

105. An isolated polynucleotide comprising a nucleotide sequence or fragment thereof encoding a polypeptide involved in or associated with the biosynthesis of chlorophyll or heme, said nucleotide sequence selected from the group consisting of SEQ ID NO 31, 47, 53, 105, 117, 127, 139, 143, 149, 175, 177, 191, 199, 221, 277, 295, 307, 325, 335, 339, 355, and 363.

106. An isolated polynucleotide comprising a nucleotide sequence substantially similar to the nucleotide sequence of the polynucleotide of claim 105.

107. An expression cassette comprising the polynucleotide of claim 105.

108. A host cell comprising the expression cassette of claim 107.

109. A transgenic plant comprising the expression cassette of claim 107.

110. An isolated polynucleotide comprising a nucleotide sequence encoding a polypeptide involved in or associated with the biosynthesis of chlorophyll or heme, said polypeptide comprising an amino acid sequence selected from the group consisting of SEQ ID NO 32, 48, 54, 106, 118, 128, 140, 144, 150, 176, 178, 192, 200, 222, 278, 296, 308, 326, 336, 340, 356, and 364.

111. An expression cassette comprising the polynucleotide of claim 110.

112. A host cell comprising the expression cassette of claim 111.

113. A transgenic plant comprising the expression cassette of claim 111.

The application's sequence listing, which the Patent Office published only in electronic form, follows.

SEQUENCE LISTING (662 sequences)

SEQ ID NO: 1 - DNA, 1434 bp, Oryza sativa
atgattctaaatgttcgatggggggagatatccgacgatgatatcgaagaatacattgaggatttcatcgaaggattcattacatctggacttgtacgaccgcaaaagggcaccacgtcgcgtgcccctactgactggccaacagctagtgacatccttcagttcaagtacaacttagtgtcttatgagggggtgaagctaataggagagcaaacaataggttcgaaagatcgggtcaactatttccaaatatttttaccattgcttcgagcgatagcccgtatggcagactggagcgaccgtgtaatttttgatgtaactggatggtcggggtcagtgcacgaccaccgggttctgctaagtccaataaggaagtatcctgatcagttccctaggctgccaccaggtaaatacttttttatcgataaggggtacgcgaatagccagggatttctcgctccttatcctgacgctcggtggcaaatattggacagtattccggcgtgcaccccacgtgcgcacaacaagattattcatgccgccatggcattgaacaactttatagttgatactatcgacccaaacgatatcgctacaaaccctctgtaccatactcatatccacccggtaccagatgtcactccagcacatcacacataccatgcgcttgagagcaaggttgtgatggatacgggcatcgctgttactagcaccggagcggagcaaggttttcaccccagagaccctgtcaaccaaagcatccacaacggaagctccgaaatgccacctgcataccgaaaaaatctggacctagaggagccagatccgaccggtcctccttgcaccatcgtcgccagccgacgccacgagggtagcatcgggcgatggaggccaccagtgccgcacgatccttccattgctggatgccgtgctgtcgccggatccgcgaacaacgccaccgccatcgccgtccctgctgccatcaccatccccgccaccatcggctaccgccatgctgcgccgtcgccggatccgcgcaactccgccaccgctattgccatccccaccaccatcgctattcctaccgccgtcgctctccacgccgccggctacgccgttcctgtccccgccagatccggctggagcggagcggatctggtggttattgccgccgcctctctgggtgactccctaggtcacccgagcgtgcgagagagaggggccccgccgccactgtccttgtggccgtgcgccagtagccactcgggcggcagcgaggcggaggagggaggtgagggagaaggggcagccgggtcgtcacctcccgtgccgcccctagggaggacgacgcgagaggatactgttatgttcccgaaccagaggaagtctcatccgaatttcatgaatcctacgtctacatcctcatctgcatga

SEQ ID NO: 2 - protein, 477 aa, Oryza sativa
MILNVRWGEISDDDIEEYIEDFIEGFITSGLVRPQKGTTSRAPTDWPTASDILQFKYNLVSYEGVKLIGEQTIGSKDRVNYFQIFLPLLRAIARMADWSDRVIFDVTGWSGSVHDHRVLLSPIRKYPDQFPRLPPGKYFFIDKGYANSQGFLAPYPDARWQILDSIPACTPRAHNKIIHAAMALNNFIVDTIDPNDIATNPLYHTHIHPVPDVTPAHHTYHALESKVVMDTGIAVTSTGAEQGFHPRDPVNQSIHNGSSEMPPAYRKNLDLEEPDPTGPPCTIVASRRHEGSIGRWRPPVPHDPSIAGCRAVAGSANNATAIAVPAAITIPATIGYRHAAPSPDPRNSATAIAIPTTIAIPTAVALHAAGYAVPVPARSGWSGADLVVIAAASLGDSLGHPSVRERGAPPPLSLWPCASSHSGGSEAEEGGEGEGAAGSSPPVPPLGRTTREDTVMFPNQRKSHPNFMNPTSTSSSA

SEQ ID NO: 3 - DNA, 1017 bp, Oryza sativa
atggcagcccccagcaagccacaacatggcgccattggccccgtgccgttcaaggacgtcatcggagacgcaatggcacagcgatcctcaccggaggaggagtatgccggcgtcgtgtccagcctcccgagctatcccaagctgcgcctgcggcactaccagggcatgtggctgatggagtacacccttccagggatcatggccatccagcggagcttcgtgccgcgccgccatggcgacgtcgtcctcgcgagccccggtaagtgcggcaccacctggctcaaggcgctcgccttcgccgtcttggcgcgcggcgcctactcccctgccagtgaccggcatccgctcctccgtcttaacccgcacgactgcgtcccgttcatggagggggcgatctctgaaggatggggtggtaagattgatgagctgccgtcgccgaggctcatgtccacccacatgcagcacgctgctctacccaagtccattgcagatgaacctggctgcaaggttgtttatatttgcagggagccgaaggatatcctggtctcagcctggcacttcttcagaattatagagcctgatctttcatttcaagaagtgttcgaggctgcctgcgatggcaagttcttgaccggcgctatctgggatcacattattggctactggaatgcttgcaaggcgaacccagagaaggtcctgtttctggtctatgaggaccttctgcgagatccggcaaacatcgtcaggaagctcgccgactttcttggccagccgttctcatcgaccgaggaagaagctggactggtgacagatattgtgaggctgtgcagcttcgagaacctgaagagcttggaggtgaataagatgggagaggcatcgttcgccttcccgaatgcgtcatacttccggaaagggaaggccggagactggaaaatccacatgacgccggaaatggtggagtgttttgacaccatcgtcaaggagaagatgcatggatctgggcttgtttttgcttga

SEQ ID NO: 4 - protein, 338 aa, Oryza sativa
MAAPSKPQHGAIGPVPFKDVIGDAMAQRSSPEEEYAGVVSSLPSYPKLRLRHYQGMWLMEYTLPGIMAIQRSFVPRRHGDVVLASPGKCGTTWLKALAFAVLARGAYSPASDRHPLLRLNPHDCVPFMEGAISEGWGGKIDELPSPRLMSTHMQHAALPKSIADEPGCKVVYICREPKDILVSAWHFFRIIEPDLSFQEVFEAACDGKFLTGAIWDHIIGYWNACKANPEKVLFLVYEDLLRDPANIVRKLADFLGQPFSSTEEEAGLVTDIVRLCSFENLKSLEVNKMGEASFAFPNASYFRKGKAGDWKIHMTPEMVECFDTIVKEKMHGSGLVFA

SEQ ID NO: 5 - DNA, 489 bp, Oryza sativa
atgttttcttcaacttgtactctatgccattgccgtcacgagccgtcagttagaatccgttttgcagtgttaattttctctgtacccaataacggacatcctggtggcgtcatccccagcaccacagaaagcatccgcccgccgcgcctccaacgccgccggccggccaggcgcaccgtccgcagcgccgctgtccccatcgtcaccgatcgcccatcacgccccgaccgccccaatcatcgatgtcctggtggcgtcgtcaccggcgctgcggcaagcttagcttctgactaccgcgcctccaccgccgatgtcctcatggcgccgctgtccccatcgtcgccgtcagcagcgcggcgccacaaccgtccgcccgcagcatctccaccgccacttccgtccccaatgcgacagcaaccggacgcgcgccgtgcctcccaggagctggacacagggaatggctccctggagctagctagctgtcgttga

SEQ ID NO: 6 - protein, 162 aa, Oryza sativa
MFSSTCTLCHCRHEPSVRIRFAVLIFSVPNNGHPGGVIPSTTESIRPPRLQRRRPARRTVRSAAVPIVTDRPSRPDRPNHRCPGGVVTGAAASLASDYRASTADVLMAPLSPSSPSAARRHNRPPAASPPPLPSPMRQQPDARRASQELDTGNGSLELASCR

SEQ ID NO: 7 - DNA, 684 bp, Oryza sativa
  misc_feature (517)..(517): r = adenine or guanine
atgcagggggcgcgcgttaatctgaaggggtggcaacaggcagcggttgcatttggttctgcatttggggcattgcttgaccctagaagagctgatctgatagctactcttggggagactactgggaagccagcatttcaccgtgtgcttcagcggatgaggaacagtgctgaaggcagggatgttctcctggagcgtcctcgagttatatccacgcaggtttctcatgcctgggacatgcctcagaacacatttggtgcagcatatgctcagttcatgggatcaaggaacttctcaccagatgaccgcccacctgtccgtttcattgacacagatgagcttgcgtatgttgcgacccgtgcccgtgaagtccatgacttttggcatgtgctgttcggccttcctacgaacctgattggagagactgcccttaaggtcattgagtttgaacagatgttccttcctatgtgcatgctttcagtcgttgggggctctgcaaggttcaatgagaaacaarggacactgtttttccagcattatttcccatgggcttcaaaagctggtcttaagtgcacagatcttatgtctgtgtactatgagaagcattttcatgaagatttggaggaagtgaggaggaactggggaattataccgtgccctaatcccaaaaggagcagtgtttag

SEQ ID NO: 8 - protein, 227 aa, Oryza sativa
MQGARVNLKGWQQAAVAFGSAFGALLDPRRADLIATLGETTGKPAFHRVLQRMRNSAEGRDVLLERPRVISTQVSHAWDMPQNTFGAAYAQFMGSRNFSPDDRPPVRFIDTDELAYVATRAREVHDFWHVLFGLPTNLIGETALKVIEFEQMFLPMCMLSVVGGSARFNEKQRTLFFQHYFPWASKAGLKCTDLMSVYYEKHFHEDLEEVRRNWGIIPCPNPKRSSV

SEQ ID NO: 9 - DNA, 513 bp, Oryza sativa
atggagagagttcctgcagttcatctggcagtggtgctcctggccttctgctgcctcatccatgcatcatcaagtgctgaaactccactcccacctggctgccgccgtcatcgccggagaaccggaggccggcgaggtcaacggcaggatggaactggagctcaccgattacccgggctccggcgccaacgatcggcactcgccatgggggcaggagaggagaaactgagcagcagcagcaaaaaatcttcagagaaaacttcatccatgtgcaatgcaaaagcgaaggttctcgtcggtaaccctacagctttggctaatcagctaaattggccttttcaattcagcataatcagccataaaaaggtgtccacaaagatcaaatacactaccaatagctgcgtgtcacgcggaatccgcccgttgcctttgccggctgcgaaaaccacgagcgggtgtaacgccgtcaacccgagaccccgagaccatcgatcccgcgccgtccgatcctga

SEQ ID NO: 10 - protein, 170 aa, Oryza sativa
MERVPAVHLAVVLLAFCCLIHASSSAETPLPPGCRRHRRRTGGRRGQRQDGTGAHRLPGLRRQRSALAMGAGEEKLSSSSKKSSEKTSSMCNAKAKVLVGNPTALANQLNWPFQFSIISHKKVSTKIKYTTNSCVSRGIRPLPLPAAKTTSGCNAVNPRPRDHRSRAVRS

SEQ ID NO: 11 - DNA, 930 bp, Oryza sativa
atgtcgcctgctgcgcctgtcgccgccgctggtctgaccgccgccttgtcgccggtccaaccgccgtcggccggtctgacagccgtgtgttgggcggtcagaccgccagttgagggccggtcagactggcggtgtgtggccggtctgaccggcaggtccgagtccgactgtgtttcgtcaggtctcgagtttctatcccaagttggacatggaggagggcctgtagagggcaagaccaacccctatataagtttgtccatctttgtcggtttgcgccgtaaaccgtccgccgccgctgcgagagtgcaacatctctttgtaggtgttgcaatcgttgttgtcaacttatcacaaaaagttgccaacacgattttggcgacttcgctggggagatccgttcaacgtcaactcaacttcgatttcgccatgacgaaaccgccgtcatccaaggtggaggtggagccggcctatgtgataccaatcacattggatgatttcgaaggagaagaccgcaagtccatggaggagtacatcaaggagctcacacaggaggcgttgatgagggcgtctactaggactcgtcaaggtgtgatcatcaagcccaggccacgtcctaggctcgctcccaatttggtaagcaatgaagaggataaatttgatgagtttttaagatttaaagtcggccctctcttggccgattttgtgggtaaaaataaagcctctagcactgctagccaagcccctatagatcaaacaaatagtagaaccgatggagtggcgcacacagctggtctgaccgggcctgatggccggtctgatcgcgacttcaccgtcggtctgaccggccaaatggccggtccgactaggtattaccccggcggtcagaccgggactcaggctggtctgactgcgcctctggatatcggttag

SEQ ID NO: 12 - protein, 309 aa, Oryza sativa
MSPAAPVAAAGLTAALSPVQPPSAGLTAVCWAVRPPVEGRSDWRCVAGLTGRSESDCVSSGLEFLSQVGHGGGPVEGKTNPYISLSIFVGLRRKPSAAAARVQHLFVGVAIVVVNLSQKVANTILATSLGRSVQRQLNFDFAMTKPPSSKVEVEPAYVIPITLDDFEGEDRKSMEEYIKELTQEALMRASTRTRQGVIIKPRPRPRLAPNLVSNEEDKFDEFLRFKVGPLLADFVGKNKASSTASQAPIDQTNSRTDGVAHTAGLTGPDGRSDRDFTVGLTGQMAGPTRYYPGGQTGTQAGLTAPLDIG

SEQ ID NO: 13 - DNA, 1086 bp, Oryza sativa
atgtcgaggtctggggccatggatcttgcatctggactcggggggaagatcaccaaggatgagtatgagaaataccatggatactatggaggaaaagaagaagcaagaaagtccaactacacagacatggttaataaatactatgatcttgccaccagcttctatgagtatggttggggtgaatccttccactttgctcacagggagaatccctacgtgaaagcattaagcgacatgagcactttcttgcccttcagcttggagtgaaaccaggaatgaaggttttggacgtcggttgtggaataggcggaccactaagagaaattgccaaatttagagcttggcttcagtcactggattgaacaacaatgagtaccagataactaggggaaagcttaatcgggtagcaggagttagtggaacttgcgactttgtgaaggcagacttcatgaagatgccgttttctgataacacttttgatgctgtctatgccattgaggcaacatgccacgcacctgatccgggctgctataaggagatctatcgtgtattgaagcctggccagtgttttgctgtgtatgagtggtgtattactgatcactatgaaccgaacaatgcaacacacaagaggatcaaggatgaaatcgagcttggcaatggcctgccagatatccgaagcactcaacaatgtcttcaagctgcaaaagatgctgggtttgaggttatttgggataaagaccttgctgaagattccccggttccttggtacctgcccttggatccaagccggttttccttgagtagcttccgtctgactactgtggggcgtgcaattactcgcacaatgaaggcattggaatacgtcggccttgccccacaaggaagtgaaagggtatctaactttttagagaaggcagctgaaggtctcgtcgaaggtggcaaaggaaggaaatcttcacgccgatgtacttctttttggttcgcaagcctatctcagaatgagctcccagaaccacatttcaggtagcatacgattttcgccagccaattaaaacatggccaatatcttctgcaatgtttccctaa

SEQ ID NO: 14 - protein, 265 aa, Oryza sativa
  X_region (67)..(69): Xaa = any naturally occuring amino acid
  X_region (115)..(115): Xaa = any naturally occuring amino acid
  X_region (135)..(135): Xaa = any naturally occuring amino acid
  X_region (177)..(177): Xaa = any naturally occuring amino acid
  X_region (254)..(254): Xaa = any naturally occuring amino acid
MSRSGAMDLASGLGGKITKDEYEKYHGYYGGKEEARKSNYTDMVNKYYDLATSFYEYGWGESFHFAXXXQGESLRESIKRHEHFLALQLGVKPGMKVLDVGCGIGGPLREIAKFXSLASVTGLNNNEYQITRGKXLNRVAGVSGTCDFVKADFMKMPFSDNTFDAVYAIEATCHAPXDPGCYKEIYRVLKPGQCFAVYEWCITDHYEPNNATHKRIKDEIELGNGLPDIRSTQQCLQAAKDAGFEVIWDKDLAXEDSPVPWYLPL

SEQ ID NO: 15 - DNA, 1050 bp, Oryza sativa
atggctcaaggtcaacttgacgccgagagcgtcgtccctaccgccaccggagtccggaggcgaggaagacgtttttggctgtttcgtttccgatcatgtttcctcgatcggtttcgccgccgtatatgtctttcgttaggatgtactgccaacatcctcgcgtcgcttccgacgagggaaggatggtggacggcgttcgtcctctaccacggctgctggatgacgcagcaggccgccacgagcgtgtcgctgcctcgctggtgcacgcccagttcgcgcggcgccccgacgatgtgctcctcgccacctacccaaagtgcggcaccacctggctcaaggtgctctccttcgccatcgccaaccgccgccgccgccggcgaccaccccttgctcacccaaagcccgcatgaccttgtgccgttcatcgaggtgcccttccaccacctccaccctctcgccgccctcgacgcgctcccctccccgaggctgctctccacccacatgccgccccagctgcttccccggcgcgtcgccgagctcggctgccgcatcgtctacctatgccgggagcccaaggacgtcgtcgtctccctgtggcactacatgaacaagggccttcgagctgtttgtcgatggcttctccctgtacggcagtacgggccgatctgggatcactgcctaggctactggaagaagagcatggaggaacccgacatggtgctcttcctcaagtacgacgacatgatggccgacccagccggccacgtcaagaagctcgccgagttcctccgagccccgttcaccgacgaggaggtcggcgccggcgtcgtcgaggaggttgtgaggctgtgcagcttcgagaagctgagccgcctacccgtgaactcctccggggtggttgatcggagcagtggacggccgatggagaactcggtgtttttcagaaaaggtgaagtcggggactggaagaactacttgactgaagagatggccaagaagttggatgccgttattgaggagaagctgaaaggatctggtctcaccttctga

SEQ ID NO: 16 - protein, 349 aa, Oryza sativa
MAQGQLDAESVVPTATGVRRRGRRFWLFRFRSCFLDRFRRRICLSLGCTANILASLPTREGWWTAFVLYHGCWMTQQAATSVSLPRWCTPSSRGAPTMCSSPPTQSAAPPGSRCSPSPSPTAAAAGDHPLLTQSPHDLVPFIEVPFHHLHPLAALDALPSPRLLSTHMPPQLLPRRVAELGCRIVYLCREPKDVVVSLWHYMNKGLRAVCRWLLPVRQYGPIWDHCLGYWKKSMEEPDMVLFLKYDDMMADPAGHVKKLAEFLRAPFTDEEVGAGVVEEVVRLCSFEKLSRLPVNSSGVVDRSSGRPMENSVFFRKGEVGDWKNYLTEEMAKKLDAVIEEKLKGSGLTF

SEQ ID NO: 17 - DNA, 417 bp, Oryza sativa
atggagcaactacaaaattggctcttcaaggtggttcgtttgaaaaatcgtcgtctaataattgcaaaacacatgccatcaagatctgacgaatcatcaaaagaaagaaacagaagaaacaaaaattgtgatcattccgcgatcgaggagtcaccgttattgaaggcggggctatatcattgcacagtggagttggatgagatggaagtaatggcagctagggatgaaaatggtcggaaacgatcggaaaacagcctcaaccatttccgtaaccatatttttctcggaaacgaaatcggaaacggtaaagtcggaaacgaaaacgatatcggaaatatcggaaaaccggaaacggaaacggaaacatgtcggtacagatcggaaaccggtaacaaatacggaaacattaaactataa

SEQ ID NO: 18 - protein, 138 aa, Oryza sativa
MEQLQNWLFKVVRLKNRRLIIAKHMPSRSDESSKERNRRNKNCDHSAIEESPLLKAGLYHCTVELDEMEVMAARDENGRKRSENSLNHFRNHIFLGNEIGNGKVGNENDIGNIGKPETETETCRYRSETGNKYGNIKL

SEQ ID NO: 19 - DNA, 1082 bp, Oryza sativa
atgtgttttggttgtttaggtgctagcgatgatgagataacagtggaagaaacttcctttgtgcatactgagcctcctcaagatggcactgctccacctgtggttacctctgatatggaagtccttaatgataaagtcaaaaagcaagtcatcaaggaaggccatggcaagaaaccctcaaggtttgccacatgctttgcactatagagcatgggttcaaggttcttcgcacaaattcgaggatacttggcaagaacagcattcaattgaactagtacttggaaaaggagaaaaaggaaatgactggtttaggcattggtgtcagtaacatgagaagtggggagcgtgcattgttacatgttaactgggagcttggctatgggaaagaaggaagcttttcattcccaaatgtccctccaatggcagaccttgtatatgaagttgaacttattgggtttgatgatgtcaaagaggggaaaagcccgaagtgatatgacagtggaagaaaggattgaagcagcagacaggaggaagattgaaggcaatgaatatttcaaagaaaagaagttcgaggaggctatgcagcaatatgaaatggcaattgcatacatgggggatgatttcatgtttcaattgtttgggaagtacagagacatggccttagctgtgaaaaatccctgccatctcaacatggccgcatgcctgatcaaactgaagagatttgatgaagctatcgccccagtgtacaattgtatgtgttgtcagaggatgaaaacaacgtgaaagcgttgttcagacgaggaaaagctagagctgaacttggtcaaacagaatcagcaagggaggacttcctgaaggccaagaagtattctccagaagacaaggagatccagcgcgagcttcggtcgctcgcggagcaggataaagctctgtaccagaaacaaaaggagctatacaaaggtctgttcgggccaaggcctgaacccaaaccgaaggcgtcaaatttcctagttctcttctggcgatggctggtctccttaattggctatcttgttaaactgttcaaacgcaaggatgagtag

SEQ ID NO: 20 - protein, 359 aa, Oryza sativa
MCFGCLGASDDEITVEETSFVHTEPPQDGTAPPVVTSDMEVLNDKVKKQVIKEGHGKKPSRFATCFHYRAWVQGSSHKFEDTWQEQHSIELVLGKEKKEMTGLGIGVSNMRSGERALLHVNWELGYGKEGSFSFPNVPPMADLVYEVELIGFDDVKEGGKARSDMTVEERIEAADRRKIEGNEYFKEKKFEEAMQQYEMAIAYMGDDFMFQLFGKYRDMALAVKNPCHLNMAACLIKLKRFDEAIAPVYNCVLSEDENNVKALFRRGKARAELGQTESAREDFLKAKKYSPEDKEIQRELRSLAEQDKALYQKQKELYKGLFGPRPEPKPKASNFLVLFWRWLVSLIGYLVKLFKRKDE

SEQ ID NO: 21 - DNA, 937 bp, Oryza sativa
atggcggcgcgatccggaccacccgccgcggccgtcgaccccgaggccgtgctctcccacagcttccccgaggtctccttcgcctacgacgagagagggatgtggcgctgtacgcgctcggagtcggggcgtgcggcgcggacgccatcgacgagaaggagctgcacctggtgtaccacagggacggccagccacacatcaagcttcctacttttgcttctttatttcctttcaagaacagcaatgggcttggaattgttgatgtgcctggccttaatttgacgcaagccttctattgcatggtcaacattacatagagatatacaagccaattcattcgcgtgccaatgggaaagcaactattcttgagattgagactacaacccatgtcaaagattctggtgaagttttatgtatgaacagaggagtactatctacctgcgtggtgctggaggcttttctgatccttcacgaccatactcctatgctagttatcccactaaccaggtttctcgcatttctattccaaattcagcgccttctgcagtatatgaagaccagacacaacaatcccagcaggcactattgtacaggttatctggggactataatcctttgcattcagaccctatggttgcgcaggttgcaggctactatctgacaaggacttctgtaggttcactcgtccaatactgcatggtctcagttcccttggattcgcgatccgcgctgtcatcaaatctttctgcaatggagatccaacagcagtgaaaagcatctttggccgttttcttctgcatgtctatcctggagaaactttagtcactgaaatgtggctccaaggccagaggtgctttatcaaacaaaggtcaaggaacgcaaccgcgccgtgctttctggatatgtgttgctcaaacacatcccctcatcattgtaa

SEQ ID NO: 22 - protein, 311 aa, Oryza sativa
  X_region (284)..(284): Xaa = any naturally occuring amino acid
MAARSGPPAAAVDPEAVLSHSFPEVSFAYDERDVALYALGVGACGADAIDEKELHLVYHRDGQPHIKLPTFASLFPFKNSNGLGIVDVPGLNFDASLLLHGQHYIEIYKPIHSRANGKATILEIETTTHVKDSGEVLCMNRGVTIYLRGAGGFSDPSRPYSYASYPTNQVSRISIPNSAPSAVYEDQTQQSQQALLYRLSGDYNPLHSDPMVAQVAGLSDKDFCRFTRPILHGLSSLGFAIRAVIKSFCNGDPTAVKSIFGRFLLHVYPGETLVTEMWLQGQRXLYQTKVKERNRAVLSGYVLLKHIPSSL

SEQ ID NO: 23 - DNA, 1270 bp, Oryza sativa
atgcacggccggcctcgccgcccggacaagccggaggacgcggcggcggcggaggccaaggccgccaagctccgcgtcctccaggcacaggtcctgcacaaccaccactcccgcactacaccaaggaggcactcgggctgagcttcaagctgctagagattaatcctgaggcgtacacagcatggaactaccggaagctcgcgtttcagcacaacattggggagctttccgagccggaggccatcaaatctgccattgatgatgagctcagagtggtagaggttgcattgaggcagaacccaaaatcctacggggcttggtatcaccggaagtggttgctaaatcaaaagctcgccccagtggatttcaagtgtgaatttggcctcttggataaactactgaaggtggacgcaaggaatttccatggatggaattaccgcaggagcttaagtacactatggataagataagtgacaacttcagtaattactcagcatggcataatcgcaggccctttttacagacccaagtgatcaaagtggatggttctatcacctttggcttttagctcagacatctagtccagagaatccacagctgattgcttcgtggccttctaatggttcactttattttaatgagcctgtgaaagggttaagttcatcgagtgtgagcttgaattctgatttggtggaagagtcgctcgggctctttaatgacttgatcgacctggatccatctcataaaaggtactacgaggatgagcggagcctagtcttaatggatcagttatctttaacgcgtattggatttgctgaacgcttgttgtgggtccaaatgctggacctaagccacaacaacctcagatcgattgaagggtttggaggctttgcagcagcttgtatgcttgaacctcggcaacaaccagatcagtagtttcacagcacttgaaccactcacgaagataatttctttgaaagtactggatttatcttgcaacgagattggaactcacccaatcgacacaacccggtacatctgcccatctccattctcacatagagttgaagcatgtgaagcttttgaagaatgccggaagaaaaatattaacgtggaggaattctgggatgccatactgttcttcaaacatgtgaatttggtacagctttgccttgaaggaaatgcagttaccaacaaggagaacttaagaactcttgtggtgacactcaatccatctctaaaatggcttgatggcaaatttgttcattag

SEQ ID NO: 24 - protein, 426 aa, Oryza sativa
  X_region (66)..(67): Xaa = any naturally occuring amino acid
  X_region (118)..(119): Xaa = any naturally occuring amino acid
MHGRPRRPDKPEDAAAAEAKAAKLRVLQAQVLHNHHSRYTKEALGLSFKLLEINPEAYTAWNYRKXXLAFQHNIGELSEPEAIKSAIDDELRVVEVALRQNPKSYGAWYHRKWLLNQXXKLAPVDFKCEFGLLDKLLKVDARNFHGWNYRRELKYTMDKISDNFSNYSAWHNRRPFLQTQVIKVDGSITFGFLAQTSSPENPQLIASWPSNGSLYFNEPVKGLSSSSVSLNSDLVEESLGLFNDLIDLDPSHKRYYEDERSLVLMDQLSLTRIGFAERLLWVQMLDLATTTSDRLKGLEALQQLVCLNLGNNQISSFTALEPLTKIISLKVLDLSCNEIGTHPIDTTRYICPSPFSHRVEACEAFEECRKKNINVEEFWDAILFFKHVNLVQLCLEGNAVTNKENLRTLVVTLNPSLKWLDGKFVH

SEQ ID NO: 25 - DNA, 3489 bp, Oryza sativa
atggcgaatactaatccaaacccttttcggttccttcgtgcggggcaagttgtgcatcaaggaggggatcagcgtcttcccagagtcgatctttctgctgctacaagacctcctcggcaacatgaacagtatgttttggagttatgggatgatcatagggttcttattactaattttcttgagcaagtccagcattttcaagttaggcgcagtttcccacatggttctgctgttgggttgtttaagatgggttctgctgtcataagagatttgttggtttattctccgtcttttgtctatgatggcattcaccaggtctgttttgttcgccatgatcagggccctaattggcgtgcttctctgttcactaggaagggttggttcctactgcttgacttccctttggattatattaatatgcaatatatatgtctggctacttccacctttggtcagttagattattggtgggaagaggatcccattaagggcagagtcatgcttagagcaatgtataaggatgctgattcagttcctaagaagattgtcttgcaagatcctacggctggggctggtgaatcctggactatatctgtttttattcttgaaggagaatttgcagacatgttcccgccagatgaagacctgcctccagttgggcataatcccggcaatgatggggacagtggttatgatggtggcccagatgacgacaatatttggcaatttggcccaaatgtgcatgtggaagaagatcacccttgggaccaagctgtagggcaggtccatgatgatgcagaaaatttggatcaggctattgataacatgggccaggttgttaacaatgacaattggcagttagttactattgagcaaacgaatttgggtttattttctgaccttgcttctgctttcactcaatttgttcatcaatggagaagtggtagactattagctatcagagatgggtttaggcaagagttagctgaagatccaaacatgggggttggtaagccaagagggaaggatgtcagaaagcttaagcagttggctgatgctagtggagtggtatttcctaatgaactgattccttttgtggatctccattctgatatttctattgataattctagtgatttgtccactgttatccctgctgattgttctgttgatttaattcagagaattggattggacatatgtggtgcttccctggaggaggagacaaagaggagcagttttgatcattcttgtattaggaagcttgctcctaagcgttttgataaatttgcattttcaccttctaggggagcttctgggggtgttttgatctgttggaatagctctatttttacagcctcaaacattgttattgagagttttggtatccaacttacttttacttctactcactctaatctttcttggaccctggttactgtctatgggccttgtgctggtattgagagagacaattttttaacctggcttcatgatctccaaattttggatgatgatctctggttactcttaggggattttaatttctatcggtcagtcttcaacaggaataagtcaggtgcagatataaatgatattttccttttcaacgaggttattagtgatctgggtttggttgaactccctattaagggcaaagcttttactttgagcaatatgcagcaacagcctttactagagcaatcagactggtttttcacttcccccagctggacactgtcttttccccacactttggtgaaacctttggctagatccatttctgatcatacaccttgtgtggtccaaattggaactaatattcctagagctaatgtgttcagatttgagaatttttggattgaacatgaaggttttttcgacttggttcagtctatctgggataaccatggttcctcccatgattctgctaaaaatatttcttcaaagcttaaagctttaagaaagggactaaaaaaatggagtaagaatctttccagactccagaagcttatctctaactgtaataatgttatctcttttctggacagtattgaggaatacagatatctttctttgttggagtggaatttcagagtttttattagatctaagctgcttacttacttaagatataagcaagtttactggcaaaagagatgtaccattagatgggcaaaatttgggggagaaaacacgaaattttttcatgccatggcaactgagtcctacaggaaaaattctattgcttccttgatagatgttgatggtactataatctttgatcatgagggtaaagctcatgtggcttgggatacttttaaaggtagaatgggagtttcaaattttgtgtctatgccttttgatctctattctttaattacccctcaaaatggtctggaagttcttgaggctccttttcccaaatccgagatagataatcttgttaagaatcttccaactgatagagctcctgggcctgatggtttcaatggactttttatgaagaaatgttggcccataatttgtcatgattattataatctttgtcaagattttcattctgggtcacttgatttaaactccttgaaccactcttttatcactttggtccccaaaaagttgacccctgaaaccataaatgattacagacctatatctctcatgagtatctctctaaagtttttgacaaagttgttggcagatagattacaaaagactattctcaatagagctttctctttggggttgctctctaagccctttccctcaaatcaggatcagaatttccctatggttcaatatgcagatgatactctcctttatgctaaggctagtggaagagaactctttactttgaaagctttgctccaatattttgctcaaggcactggtttgaaagttaattaccataaatcctgcttaattcctataaacatatctgatgaaaaggctgatttgctggctggagtgtttggttataaggttggttctcttccttttacttatcttgggctacctttgggaaccactaagccgagggtaattgattttgcccctttggttgatagagttgaaagaaggttgtcggcaaatgctgctttcctctcttatggtgatagacttaccttggttaacacagttttttcctctctgcctacatattatatgtgtactcttttgttgcccaagactgtaattgacaatattgatagagcaagaaaacattgcttgtggagaggttcagaggtaaactctaatagaaagtcgttggctgcctgggataaagtatgcaaaccaaagatgaaaggaggtcttggagtcattaacctttcaatccagaatcaggctttactcctaaagtttcttgataaattttataataggagaaaggtgccttgggttgacctcatatggaattcttactactcaggttgtgcctcatttttcaacctcaaagggttctttttggtggagagacatttgtaa

SEQ ID NO: 26 - protein, 1162 aa, Oryza sativa
MANTNPNPFRFLRAGQVVHQGGDQRLPRVDLSAATRPPRQHEQYVLELWDDHRVLITNFLEQVQHFQVRRSFPHGSAVGLFKMGSAVIRDLLVYSPSFVYDGIHQVCFVRHDQGPNWRASLFTRKGWFLLLDFPLDYINMQYICLATSTFGQLDYWWEEDPIKGRVMLRAMYKDADSVPKKIVLQDPTAGAGESWTISVFILEGEFADMFPPDEDLPPVGHNPGNDGDSGYDGGPDDDNIWQFGPNVHVEEDHPWDQAVGQVHDDAENLDQAIDNMGQVVNNDNWQLVTIEQTNLGLFSDLASAFTQFVHQWRSGRLLAIRDGFRQELAEDPNMGVGKPRGKDVRKLKQLADASGVVFPNELIPFVDLHSDISIDNSSDLSTVIPADCSVDLIQRIGLDICGASLEEETKRSSFDHSCIRKLAPKRFDKFAFSPSRGASGGVLICWNSSIFTASNIVIESFGIQLTFTSTHSNLSWTLVTVYGPCAGIERDNFLTWLHDLQILDDDLWLLLGDFNFYRSVFNRNKSGADINDIFLFNEVISDLGLVELPIKGKAFTLSNMQQQPLLEQSDWFFTSPSWTLSFPHTLVKPLARSISDHTPCVVQIGTNIPRANVFRFENFWIEHEGFFDLVQSIWDNHGSSHDSAKNISSKLKALRKGLKKWSKNLSRLQKLISNCNNVISFLDSIEEYRYLSLLEWNFRVFIRSKLLTYLRYKQVYWQKRCTIRWAKFGGENTKFFHAMATESYRKNSIASLIDVDGTIIFDHEGKAHVAWDTFKGRMGVSNFVSMPFDLYSLITPQNGLEVLEAPFPKSEIDNLVKNLPTDRAPGPDGFNGLFMKKCWPIICHDYYNLCQDFHSGSLDLNSLNHSFITLVPKKLTPETINDYRPISLMSISLKFLTKLLADRLQKTILNRAFSLGLLSKPFPSNQDQNFPMVQYADDTLLYAKASGRELFTLKALLQYFAQGTGLKVNYHKSCLIPINISDEKADLLAGVFGYKVGSLPFTYLGLPLGTTKPRVIDFAPLVDRVERRLSANAAFLSYGDRLTLVNTVFSSLPTYYMCTLLLPKTVIDNIDRARKHCLWRGSEVNSNRKSLAAWDKVCKPKMKGGLGVINLSIQNQALLLKFLDKFYNRRKVPWVDLIWNSYYSGCASFFNLKGFFLVERHL

SEQ ID NO: 27 - DNA, 3306 bp, Oryza sativa
atgacgcgccggggagcggcctccctcgggaggacgctcgccgggttcctggcgcatgaagatccagccaaggtcctctccctatttgcggacaaggccaggcagcatgggggtcttggccccctcgacttcgcgtgcgccctgcgcgcgtgcagggggaatggcaggcgttggcaggtcgttccggagatacacgcgaaggctgtcacgcgtggtcttgggaaatacaggatcgtcggcaaccttctgattgacctgtactccaagaacgggcttgttctgcctgcgaggcgggtgtttgaggagctttctgccagggacaatgtctcctgggtggcaatgctgtcagggtatgcgcagaatggccttggggaggaagctctcgggctgtatcgccagatgcatcgagctggggttgttcctacaccttatgttctgtctagcgtcctgagttcgtgcactaaagcggagctctttgcgcaaggacggttgattcatgcccaaggttacaagcacggattctgctctgaaatctttgtggggaatgctgttatcacgctgtacttgcggtgcggatcattcagattggcagagagagtattttgcgacatgccacaccgtgacacagtaacattcaatacgttgatctcaggacatgctcagtgtggacatggggagcatgctttagagatatttgaggagatgcagttctcagggttaagccctgattgtgtgaccatttctagtctgcttgcagcttgtgcgtcgcttggtgatcttcaaaaggggacgcaactccattcctatctgtttaaagcaggcatctcttcggattacataatggaaggttcactccttgacctctatgtgaaatgtggtgatgttgaaactgcccttgtgatcttcaattcgagtgataggactaacgtagtactctggaacctgatgcttgtggcatttgggcagatcaatgatctagcaaagtcttttgagctattctgtcaaatgcaggctgcaggtatacgccctaaccaattcacgtacccatgcattttaaggacttgcacttgcactagagaaattgaccttggagagcagatccattcattaagtgtaaaaactggcttcgagtctgatatgtatgttagtggtgtattgatagatatgtattccaaatatgggtggcttgaaaaggcaagacgtgttcttgaaatgcttaaagagaaagacgtggtttcctggacttccatgattgctggatatgtgcaacatgagtgttgtaaggacgctcttgcagcttttaaagagatgcagaaatgtggaatttggccagataacataggactagcaagtgctataagtggctgcgctggaatcaatgcaatgaggcaaggcttgcagattcatgctcggatttatgtgtctggttattcaggagatgtttcaatttggaatgcattggtaaacctttatgcacgatgcggaagaatcagagaagctttctcttcattcgaggaaattgacctaaagttggataacatggaacggcctgctcttagtgcttcagctaaccttgcagaaataaaacaaggaaaacaaatacatgccagagttattaaaacaggtcattccttcgaaactgaagttggaaatgctctgatttccttgtacgggaagtgtggtagctttgaggatgccaagatggaattttctgaaatgtctgagagaaatgaggtgtcatggaatactattatcacaagctgttcacagcatggacgtggcttggaggctttggatttatttgatcaaatgaagaaagaaggtattaaaccaaatgatgttacattcataggtgttttagctgcttgcagtcatgtgggattggtggaggaaggccttagttacttcaaatcaatgtctgatgagtatggaattcgtccaaggcctgatcattatgcttgtgttatcgatatctttggacgagctgggcaacttgaccgtgcaaagaaatttattgaggaaatgccaattgctgctgatgctatggtttggagaacccttctcagcgcctgtaaagtacacaagaacatagaagttggagagtttgcagccaaacatctattggaattggagcctcatgattctgcatcatatgttcttctctcaaatgcatatgctgttaccgagaagtgggccaatagggatcaggtcagaaagatgatgagagacagaggagtcagaaaggaaccaggccggagctggattgaagtaaagaatgtggttcatgcattctttgttggtgacagattacaccccttggctgagcagatatacaattttttggctgttataaatgatagggtagccaaagtaggatacaagcaagagaaatatcatctcttccatgataaagagcaagaagggagagatcctactgatcttgtgcacagcgagaagttagctgtgacttttgggttgatgagtttgcctccctgtatgccccttcgagtcattaaaaatcttcgtgtggagaaatatacttcattgtatgccaactttcttcatcagaagagaacaaatggtcaagtagggtctattatcagtcactgctgtgatggagctgacatgcccaaaccaaaaaatggcttatccagcagggtattcgatgcctccttgaaagagaagctggtgcatattttgtgtgctttcagaggaatagtcgggagtatgtcggctgccacgcgatccgctgctgggctacctggaggaaggaaaccagggtttatggacgagctcatccatgaggttggactgcgggaacatcataggttgatgaaacaaacagctgctgactggtggcgacatcatccacaaacttgtgcagacgctgagccccagatcaagcccctccatcagagagttgacagggcaaatgctgcaggatatggtataatatcttccaggagggaaatctatgccatgattatcttggatctagatcagaagtattcttaccgctccatactcgtttatgtgcttcttctttatgacaaaaccaacgatgatcaacttctcaagcatctgaagcgagaaattatccacggcatgcaacagtcgtgcagagatccagaaatgggtcgtgagatggatgaggttgctgctatgttttgttcaaagcaagggaaacctgtcgggaattatgcttcgctggtgaaggaagcacgggagcgtctggtggtgaagaagaaagaacaagaatcggctaccaacgaaagttttgatgtgatgaaaaagttgaaagtttga

SEQ ID NO: 28 - protein, 1101 aa, Oryza sativa
MTRRGAASLGRTLAGFLAHEDPAKVLSLFADKARQHGGLGPLDFACALRACRGNGRRWQVVPEIHAKAVTRGLGKYRIVGNLLIDLYSKNGLVLPARRVFEELSARDNVSWVAMLSGYAQNGLGEEALGLYRQMHRAGVVPTPYVLSSVLSSCTKAELFAQGRLIHAQGYKHGFCSEIFVGNAVITLYLRCGSFRLAERVFCDMPHRDTVTFNTLISGHAQCGHGEHALEIFEEMQFSGLSPDCVTISSLLAACASLGDLQKGTQLHSYLFKAGISSDYIMEGSLLDLYVKCGDVETALVIFNSSDRTNVVLWNLMLVAFGQINDLAKSFELFCQMQAAGIRPNQFTYPCILRTCTCTREIDLGEQIHSLSVKTGFESDMYVSGVLIDMYSKYGWLEKARRVLEMLKEKDVVSWTSMIAGYVQHECCKDALAAFKEMQKCGIWPDNIGLASAISGCAGINAMRQGLQIHARIYVSGYSGDVSIWNALVNLYARCGRIREAFSSFEEIDLKLDNMERPALSASANLAEIKQGKQIHARVIKTGHSFETEVGNALISLYGKCGSFEDAKMEFSEMSERNEVSWNTIITSCSQHGRGLEALDLFDQMKKEGIKPNDVTFIGVLAACSHVGLVEEGLSYFKSMSDEYGIRPRPDHYACVIDIFGRAGQLDRAKKFIEEMPIAADAMVWRTLLSACKVHKNIEVGEFAAKHLLELEPHDSASYVLLSNAYAVTEKWANRDQVRKMMRDRGVRKEPGRSWIEVKNVVHAFFVGDRLHPLAEQIYNFLAVINDRVAKVGYKQEKYHLFHDKEQEGRDPTDLVHSEKLAVTFGLMSLPPCMPLRVIKNLRVEKYTSLYANFLHQKRTNGQVGSIISHCCDGADMPKPKNGLSSRVFDASLKEKLVHILCAFRGIVGSMSAATRSAAGLPGGRKPGFMDELIHEVGLREHHRLMKQTAADWWRHHPQTCADAEPQIKPLHQRVDRANAAGYGIISSRREIYAMIILDLDQKYSYRSILVYVLLLYDKTNDDQLLKHLKREIIHGMQQSCRDPEMGREMDEVAAMFCSKQGKPVGNYASLVKEARERLVVKKKEQESATNESFDVMKKLKV

SEQ ID NO: 29 - DNA, 417 bp, Oryza sativa
atgaaaaagggaagcaactcatttcgattcagcaaagcgaggattctacgcaaactcattaaactcaacgagaaagcaagagggagaagaagaaaaaggaagaaggagcgaatcatccatgggccatggcgcatcgcacccaagcaagaaggcagcaggttcagtgcatgcacgcgcctgacctctggcggcagacagacaggaattttggataggaaaaagtacaaattaccccccgaattatcgtggttgaccgaattaccccctgaacatgaaactaggtgcaggtccgcacagccggcaacggtgtgtgcgattgggtggggttggcgaagcgtggcgctgcgccaagaggaaggcggcggtttcgggcatcccaagctccgccgctccctccaccgccccaagcgccggtga

SEQ ID NO: 30 - protein, 138 aa, Oryza sativa
MKKGSNSFRFSKARILRKLIKLNEKARGRRRKRKKERIIHGPWRIAPKQEGSRFSACTRLTSGGRQTGILDRKKYKLPPELSWLTELPPEHETRCRSAQPATVCAIGWGWRSVALRQEEGGGFGHPKLRRSLHRPKRR

SEQ ID NO: 31 - DNA, 3120 bp, Oryza sativa
  misc_feature (246)..(246): k = guanine or thymine
  misc_feature (853)..(853): m = adenine or cytosine
  misc_feature (857)..(857): s = guanine or cytosine
  misc_feature (900)..(900): m = adenine or cytosine
  misc_feature (1616)..(1616): s = guanine or cytosine
  misc_feature (1626)..(1626): y = cytosine or thymine
  misc_feature (1652)..(1652): y = cytosine or thymine
  misc_feature (1656)..(1656): m = adenine or cytosine
  misc_feature (1674)..(1674): w = adenine or thymine
atgcggctccccgtcacggtggtagttgaggactgcgacctggtgctttcgctggccccacacaacctcccgcaccccggacacggcagtgcggtcggtgtccgcgcgctggaaaagcctcgtactacgcccgagctgccaagcacctccctagcggggtaccctgagtgagatcccgatccaaccccccctcctcctccgctgtccagatccagccgccgccgccgccgtcgccggcgggcggcktggccagatccggcgccatggagaagccgagcacgctgctggtccacttcgacaagggctccgccgccatggccggtgagatcaaggcggatctcgagggcagcgacgtggccgccaaggtggacgccatgaagcgcgccgtcatgctcctcctcaacggcgagaccctccccaccctcttcatcaccgtcgtccgctacgtcctcccctccgaggaccacaccatccagaagctgctcctcctctacctcgagatcatcgacaagcgcgacgccgccggcaggggcctcccggagatgatcctcatctgccagaacctccgcaacaacctccaccaccccaacgagtacatccgcggcgtcaccctccgcttcctctgccgcctctccgagcccgaggtgctcgagccgctcgtgccctccatcctcgagaacctcgaccaccgccaccacttcatcaggcgccacgcgctctccgcgatctcctccatctaccgcctcccgcacggcgaccagctcgtccccgacgcgcccgagctcgtggagcgcgcgctcgcctcggagcaggacgcctccgcgcgccggaacgcgttcctcatgctctggamctgsgcgcaggagcgcgccgtcgcgtacctgctcttccaacgccgamcgcgtcgccgagtggcccgacctcctgcagatggccgccgtcgatctcatccgcaaggtctgccgctccccgaaccgcgccgacaagggaaggtatatcaagatcatcatcgcccttttgtcatcccccagcaccgctgttgtctatgagtgcgctggtgcgctcgtgtcgctctcctcggcgcccactgccgtgcgcgctgccgcaaacacgtactgcgagctgctgtcgtcacagagcgacaacaatgtgaagctcattgtcctggaccgcctgaatgagctgcgcacctcgcaccgtgatgtgatggtggatgtagtgatggacgtgctgcgtgcactcgccagtcccaacttggatgttaagaggaaggtgctggatttggtgctcgatctgctcaccgctcgtaatgtggaggaggttgttctgtacctcaagaaggaggtggtcaagacgcaggcaggggaacttgagaagagtggtgaataccgccagatgctggtgcaggcgatccatgcctgtgctgtggagtatccagaggtggctgggtcagtggtgcacctactcatggatttccttggtgacactaatgttgctgctgcagttgatgttgtgttgttcgtgcgtgagatcattgagactaatcccaagctgcgtgtgtccatgatccagagattgattgatacattctatcagatccgggcatcccgtgtgtscccgtgtgcyttgtggatccttggggagtactctcyctcmttatcagaggttgagaawgctatctccaccattaagcaatgccttggcgatgtaccgttctatacagtatctgaggaaggggaggcaactgactcagccaagccagcacaaccagtggtgaactctgttaccgtgtcttctaggcggcctgttgttcttgcagacggcacttatgccacacagagtgctgccactgaggccatttctactccatcagttgctcctgggtcattatcatcgaccctgaatctcagatcactcattctgtcaggcgatttcttcttggctgccgttatttcctgtaccttgaccaaacttgtattgaggctggaggaggttcagccctcaatggttgaagtgaacaaggcttgtactggggctttgctggtcatgacatccattctgcagctgggacaatcatcttaccttccacacccaattgataatgattcatatgacaggatagtgctttgtgtgaggttgctttgcaatactggtgatgatgtcaggaaggtctggttacagtcatgtaggcagagctttgcaaagatgcttgctgagaagcagttccgggagacagaggagatgaaggcaaaggcacagatctctcacgctcaaccagatgatcttatagatttctaccacctgaagagcagaagggggcatgagtcagcttgagttggaagatgaagttcaagatgacttgaaggctgcaactggtgggtttactaaggatgcatatgatgcaaacagacttaaccgcattcttcagttgactggattcagtgatcctgtgtatgctgaagcatatgtgacagttcatcattatgatattgtacttgatgtgactatcattaaccgtacaaaggagacacttcagaacttgtgcttggaattggctacaatgggagacctcaaacttgttgaccgccctcagaactacaccttggctcctgagtcaagcaaacaaatccgtgctaatatcaaggtttcatcaacagagactggagtaatatttgggaacattgtttatgaaacttcaaatgtgatggagcgatcagtggttgtgctaaatgatattcacattgacatcatggattatatctcaccagcaacttgcgctgatgttactttccgtaacatgtgggcagaatttgagtgggaaaacaagaggtggcagtgaatactgtcattcagaatgagaaggagtttttggatcatatcatcaagtcaacaaacatgaagtgtctaacaccaccgtctgcgcttgacggagaatgcggttttctcgccgctaacctttatgcaaagagtgttttcggtgaagatgctttggtaaatatcagcatcgagaagcagtttgatggcaagctcagtggttacatcagaataaggagcaagacccagggaatcgcactcagcttaggagacaagattaccctcaagcagaagggaggcagttaa

SEQ ID NO: 32 - protein, 1047 aa, Oryza sativa
  X_region (82)..(82): Xaa = any naturally occuring amino acid
  X_region (284)..(285): Xaa = any naturally occuring amino acid
  X_region (299)..(299): Xaa = any naturally occuring amino acid
  X_region (396)..(397): Xaa = any naturally occuring amino acid
  X_region (454)..(454): Xaa = any naturally occuring amino acid
  X_region (541)..(541): Xaa = any naturally occuring amino acid
  X_region (553)..(553): Xaa = any naturally occuring amino acid
  X_region (560)..(560): Xaa = any naturally occuring amino acid
  X_region (636)..(636): Xaa = any naturally occuring amino acid
  X_region (756)..(756): Xaa = any naturally occuring amino acid
  X_region (781)..(781): Xaa = any naturally occuring amino acid
  X_region (785)..(785): Xaa = any naturally occuring amino acid
  X_region (789)..(789): Xaa = any naturally occuring amino acid
  X_region (903)..(903): Xaa = any naturally occuring amino acid
  X_region (947)..(947): Xaa = any naturally occuring amino acid
  X_region (1009)..(1012): Xaa = any naturally occuring amino acid
MRLPVTVVVEDCDLVLSLAPHNLPHPGHGSAVGVRALEKPRTTPELPSTSLAGYPERSRSNPPSSSAVQIQPPPPPSPAGGXARSGAMEKPSTLLVHFDKGSAAMAGEIKADLEGSDVAAKVDAMKRAVMLLLNGETLPTLFITVVRYVLPSEDHTIQKLLLLYLEIIDKRDAAGRGLPEMILICQNLRNNLHHPNEYIRGVTLRFLCRLSEPEVLEPLVPSILENLDHRHHFIRRHALSAISSIYRLPHGDQLVPDAPELVERALASEQDASARRNAFLMLWXXAQERAVAYLSSNAXRVAEWPDLLQMAAVDLIRKVCRSPNRADKGRYIKIIIALLSSPSTAVVYECAGALVSLSSAPTAVRAAANTYCELLSSQSDNNVKLIVLDRLNELRXXTSHRDVMVDVVMDVLRALASPNLDVKRKVLDLVLDLLTARNVEEVVLYLKKEVVKTXQAGELEKSGEYRQMLVQAIHACAVEYPEVAGSVVHLLMDFLGDTNVAAAVDVVLFVREIIETNPKLRVSMIQRLIDTFYQIRASRVXPCALWILGEYSXSLSEVEXAISTIKQCLGDVPFYTVSEEGEATDSAKPAQPVVNSVTVSSRRPVVLADGTYATQSAATEAISTPSVALGHYHRPXNLRSLILSGDFFLAAVISCTLTKLVLRLEEVQPSMVEVNKACTGALLVMTSILQLGQSSYLPHPIDNDSYDRIVLCVRLLCNTGDDVRKVWLQSCRQSFAKMLAEKQFRETEEMKAKAQXSLTLQPDDLIDFYHLKSRRGHESAXVGRXSSRXLEGCNGGFTKDAYDANRLNRILQLTGFSDPVYAEAYVTVHHYDIVLDVTIINRTKETLQNLCLELATMGDLKLVDRPQNYTLAPESSKQIRANIKVSSTETGVIFGNIVYETSXNVMERSVVVLNDIHIDIMDYISPATCADVTFRNMWAEFEWENKXVAVNTVIQNEKEFLDHIIKSTNMKCLTPPSALDGECGFLAANLYAKSVFGEDALVNISIEKXXXXQFDGKLSGYIRIRSKTQGIALSLGDKITLKQKGGS

SEQ ID NO: 33 - DNA, 1245 bp, Oryza sativa
atggatccatttgcgcgaaccaactcattgaggcggatccatgaacgctatctccttcccccttcggagagtaacactgacgctggtttttacgtctatattctggagtcaagttacagaggtggagaagtgaggagggtcttttgtccttatgcaaggcaagctgatccagctggaccatgcaaggccaggaataacttgtgtaaacttgagagagagggattcattgaatcatctccggcacaggattgtgacctctgctgcaaaatgcctgatttctgccgagagtgctgctgtgttttctgccgcagggttgttgactattcctttggaggttatagctacattaagtgtgaggcagtcctagaagagaacaaaatatgtgggcatattgggcaccttgattgtgctctccgtacttttatggctggaacagttggaggatgtattgacttggacatgcagtattgttgcagacgttgtgataacaaaacgaacttgatgctgcacgtagaaaaattcttggaaatatgccaatctcttcaatcaagggatgacattgaacctatcctgaatactggcttatgcctagtgcgtggttcaagacaaacaagagcaaaaagcttggagagcattatgagatcagcaatggcaaagctaaagtgtggggttgatcttgctgaagtttggaaaatggaagataatggtatcaactcaactccaagtgcagaagtttcccctgctaccggtggtgtaacagtgcttgggatccagcaagctccagaagaggatgctcctccagggtttccatattatgttgatttggctgacaatgatttgcagagggctgttgaaaatcttccagcttacattaccgaggatcaacacacactgtctgtcaggttcgaagattcgatagatcatgctcttaaagaactgaagagatctcaggaagcagagtacaagctggcagagcagaagctttattcccagaaggatcatgtcctgagtctttatcgtcagcttgattctgaaagatccgtccttgcagaccctatgcccttagctgatgatgatggttcactatatagtacactaatcaccaatgttatgaagcgtgtggatcaagtgaagagtgaagaggagaagctcaaggtcatgctgggaatcgctgatggatttgggaaaacgccatcaggagtcattcaggagcatttcgggctacctgctgatactgccaactga

SEQ ID NO: 34 - protein, 414 aa, Oryza sativa
MDPFARTNSLRRIHERYLLPPSESNTDAGFYVYILESSYRGGEVRRVFCPYARQADPAGPCKARNNLCKLEREGFIESSPAQDCDLCCKMPDFCRECCCVFCRRVVDYSFGGYSYIKCEAVLEENKICGHIGHLDCALRTFMAGTVGGCIDLDMQYCCRRCDNKTNLMLHVEKFLEICQSLQSRDDIEPILNTGLCLVRGSRQTRAKSLESIMRSAMAKLKCGVDLAEVWKMEDNGINSTPSAEVSPATGGVTVLGIQQAPEEDAPPGFPYYVDLADNDLQRAVENLPAYITEDQHTLSVRFEDSIDHALKELKRSQEAEYKLAEQKLYSQKDHVLSLYRQLDSERSVLADPMPLADDDGSLYSTLITNVMKRVDQVKSEEEKLKVMLGIADGFGKTPSGVIQEHFGLPADTAN

SEQ ID NO: 35 - DNA, 300 bp, Oryza sativa
atgttgagcccgctccggctggtgctcgtgaagcatgaggtggcctcggcggcagaggagtgtagatcgaacgcccactccaccaagacgcgcaccgttgccgatggcgacaagatgggcagcgtgctctggcagtggactcggtggcgagggctcatcacgagcaagcgcctggaggaccaccctgttgccacccgttgccgccttgctgcatcccaccactgccctgctgccatgctcgccgccatcgtgaggaaaagagaagaaagagaggggccaatgacagaccaaaggaggtag

SEQ ID NO: 36 - protein, 99 aa, Oryza sativa
MLSPLRLVLVKHEVASAAEECRSNAHSTKTRTVADGDKMGSVLWQWTRWRGLITSKRLEDHPVATRCRLAASHHCPAAMLAAIVRKREEREGPMTDQRR

SEQ ID NO: 37 - DNA, 1620 bp, Oryza sativa
atggtcgccggcggcgactggagctcgccgcccgccgaacagccaaaatcacgaggtgtttgtggaattgtccgtaagcgcgcggtctcttccccgcgaagcaaggatgtggatgttctttttggagaaaaaggatctggcccgccgccttttctgtgtgcatatgggacacgagcggaaggtgttcgtgcaaatgcggcagacagcacagcggttaaagatgctgatgatcctaaaatcaagtcaaatgcggctgttgtatctactttctcaggtcccccttcctcggatcaacacctcatctatataatgctgaaaccagcgttggctgaggtaatcaagagtcgcgtcgagacagtccgccagaacaaggaggactgcgagctgctcgccgaacgcgcggacatgatccttgatctgctacggcgggttcaggcatccaaggtcatcgaggaccctgacatgtggaagcccacagaagggctcaagtcgacactttgcagggcaggtgcaatcgttaaatcctgtcaggaggagtggagctatgcgtaccgtttctgcaagggcggacgcatcgccagagagctgcgcaaggtactcaaggatctcaagttttacatcctccacctgataggaatgatcaccatcatcaaccacgatcaaaacactcgttactattatatcccggagactgatgttgttaagccgcaggatgctacagcttccaacgctggaaagcctgttgctctagaagaaacaggccttaaaaagttcactttgtctgagttggaggttgctacagataatttctctctggaaaaacaaatcggtataggtgctttcagcatcgtgtacaagggccaactaaatgaaatgcccgaagttgctgtgaaaagagcatcgtatgttaacagaattccatttgaccagctcgaaaatgaggctaaaataatttcaaagcttcagcatacaaatatagttaaacttctaggatattgcagccaagagagagagaagatactggtcttcgagtatatgccaggcagaatcttagattcattcataactggtgagcgagcagaagagttgcctttggactggtctaagcgctcccaaatagttaaagggatagctgatggagctgtatatctacacaagcaatgtgagccacgtattattcatggcgatctgaaaccaggcaacatactcctggatgctgccttgaaacccaagatttgtgactttggtacatcgaaagcacttaggccaggtcaggatatggactgcaccggcattgtggtgggatcacgtggatatatggcccctgaatataaacagggagggtgtgtctctctcaagacagatgtgtacagctttggcgctacgcttctcgagatcattagaggaagtcgcatccctccgtctacattggagctttctgatgaatcgcgcgattttgggcctctaaataagtgggcgtgggaattgtggagaggaggaaacctgatggagttcatcgacccttcgctgcgcggagagactcattctgcagccgagatacaggggtgggttcagatagcgctgctgtgcgttcagcgtgttgaaattataagcacataa

SEQ ID NO: 38 - protein, 539 aa, Oryza sativa
MVAGGDWSSPPAEQPKSRGVCGIVRKRAVSSPRSKDVDVLFGEKGSGPPPFLCAYGTRAEGVRANAADSTAVKDADDPKIKSNAAVVSTFSGPPSSDQHLIYIMLKPALAEVIKSRVETVRQNKEDCELLAERADMILDLLRRVQASKVIEDPDMWKPTEGLKSTLCRAGAIVKSCQEEWSYAYRFCKGGRIARELRKVLKDLKFYILHLIGMITIINHDQNTRYYYIPETDVVKPQDATASNAGKPVALEETGLKKFTLSELEVATDNFSLEKQIGIGAFSIVYKGQLNEMPEVAVKRASYVNRIPFDQLENEAKIISKLQHTNIVKLLGYCSQEREKILVFEYMPGRILDSFITGERAEELPLDWSKRSQIVKGIADGAVYLHKQCEPRIIHGDLKPGNILLDAALKPKICDFGTSKALRPGQDMDCTGIVVGSRGYMAPEYKQGGCVSLKTDVYSFGATLLEIIRGSRIPPSTLELSDESRDFGPLNKWAWELWRGGNLMEFIDPSLRGETHSAAEIQGWVQIALLCVQRVEIIST

SEQ ID NO: 39 - DNA, 1893 bp, Oryza sativa
  misc_feature (1854)..(1854): m = adenine or cytosine
atgggcaccggcggcggcagggtcgccctcgacggcggcggccggcgccggaggaagctggacgaagaggatgatgaggagtatgtggcggacgacgacgaggaggaagacgaagacgaagacgaggaggagtaccaacaggccgccgccccctccgacgacggcgaggaggggggcgacgacgaagcggagccggaggacgaatctgatgcggatttcgtcggggacgaggaggaggaggaggaggacctcgaagacgaagatgatttggaggaggtcaaggcgccgcgccccaagcgcccgcccaaggggaagccgccgccgagatctcgccgtcggaggcaaaaggacgacgacgatgactacgaagaggaggaggaggaggacgccgacttcgatccggacgtggacgaagacgacgaggaagaggtagatgaagatgaagaggaatttgagcaagatgacgacgattccgatgattttgccccgattcgcgtcagaaagaccagcaccaagaaccacgtggccaagcggaagccaccacccggccgtaagaagaagaagaggaaaccttctagggtttctaaggcaaagcctaagaagcccacctcagggcgccgccggaggaagcgatgggccaccgatgacgacgaggaagaagaggacgatgcggatttcatcgtggaggacgatcaggaagaagaggaggacgaccaccgcccaaagaagaaggccaaggctgctaggaagaccagggatgtcacgccggagccggatgtcgaggcaagcgcatggccggccgtcgaatcagacacttcagaattcgaattcgtgacatctgatgaagaagctgctgacaaggaagcaccagccgctgaaccagcaaaaaccaaggggaagaagggcaggaagaggtggggatctgggtcagagtcatcatctgattctgattatgtcatatcagagcaggaactgaaggatctggaagtctccatgcctccagatgcagctctgcaatcacctgcaaccctgccgcgccggacctttctttcaaggagggtgggggagaaggggaaagagcctgaagaggcttggaaacagacatgtgggatatgcctctcggaagaacagagagccacgatacagggtgtgcttaattgctgcgcacattacttctgcttcgcttgcatcatggagtggtcaaaggtggagtccaggtgcccattgtgcaaacgccgattcacaacaattaccaagtcatcaatggcagatctagggcttggatcaaggaaagctgtcattagggtagaaaaacgtgatcaggtgtatcagcccacagaagaggaaatgagacgttggttggatccgtatgaaaatgttgtatgcatagagtgcaatcgtggatggaagaccaagtaccagaaggaaactgggtactgcggaggatgtagatccggtggggagggcccctctgcacaggatacggtggttcactgcagagaaagtaataccaaccctgccaacagtagttctggatcatttggctcagccacaccaagtggagtgttccagagaccaccaccaatcaacacccaaccttctctacaaggattcgatctaaatctctcaccaagagaaacccctgatgaagataagcgagaagagtcacatgtttcagctgatgctgtttcgactcctactggaaggcatgccactctcgataggaggcgggcctttaaccgacgaattcgcatccttctatttagaccaagggtcacacctaatgggtggcagaatccgattcagtctgacaggacaataccagagaatgaacaaaatccacagagcacgtcmactccaactgaagtgaaccccatcatgttccagggatag

SEQ ID NO: 40 - protein, 630 aa, Oryza sativa
MGTGGGRVALDGGGRRRRKLDEEDDEEYVADDDEEEDEDEDEEEYQQAAAPSDDGEEGGDDEAEPEDESDADFVGDEEEEEEDLEDEDDLEEVKAPRPKRPPKGKPPPRSRRRRQKDDDDDYEEEEEEDADFDPDVDEDDEEEVDEDEEEFEQDDDDSDDFAPIRVRKTSTKNHVAKRKPPPGRKKKKRKPSRVSKAKPKKPTSGRRRRKRWATDDDEEEEDDADFIVEDDQEEEEDDHRPKKKAKAARKTRDVTPEPDVEASAWPAVESDTSEFEFVTSDEEAADKEAPAAEPAKTKGKKGRKRWGSGSESSSDSDYVISEQELKDLEVSMPPDAALQSPATLPRRTFLSRRVGEKGKEPEEAWKQTCGICLSEEQRATIQGVLNCCAHYFCFACIMEWSKVESRCPLCKRRFTTITKSSMADLGLGSRKAVIRVEKRDQVYQPTEEEMRRWLDPYENVVCIECNRGWKTKYQKETGYCGGCRSGGEGPSAQDTVVHCRESNTNPANSSSGSFGSATPSGVFQRPPPINTQPSLQGFDLNLSPRETPDEDKREESHVSADAVSTPTGRHATLDRRRAFNRRIRILLFRPRVTPNGWQNPIQSDRTIPENEQNPQSTSTPTEVNPIMFQG

SEQ ID NO: 41 - DNA, 1463 bp, Oryza sativa
atggcggcggggctactgctgaagctggtcgggttctgcttctgggccgtcttctggctcggcggcgccgccaccgtcagcaccaacgccggcggcgaggcggcggcggcggcggtggtggtggacgcgcggtccgccattgctgtgacggacgaggacttcgtgtgcgcgacgctggattggtggccgccggacaagtgcgactacggcacctgcagctggggactcgccaccctcctcaacatggcattctcacctctgaagcttaggctgggaggatccttgcaggatgtgttgatatacgacaccggcgatcctcggcagccgtgcactccgttcacgaagaactcatcggccatgttcggtttcactcaaggttgcctgccgttgcatagatgggacgagctcaatgcattcttccaaaaatcaggaaaattatctttgggctgaatgctctgaatggtagggttccaatgtctgatgattctttaggagggccatggaattacaccaatgcggcttccttcattcgctacactgtcagcaagggctatgacatccatggatgggaactcgggaaatgaactcagtggcagtggagttggagctcgagttgatgcagaccaatatgcacaagatgttctagctctgaaacaaatcattgacaactcctaccaaggccatgcatcaaagccactggtgatcgcaccgggaggtttctttgatgcagcctggttcactgagcttatcagcagaacaaagccaaaccagatggatgtgatgactcaccacatctacaatctaggccctgggcgtcgacacgcacctgattgataaaattcttgacccgtcttacctcgacggcgaggccggcacattcagcagtctccaggggatactgaagtctgcagggacgtccaccgtcgcgtgggtcggcgaggctggaggcgcttacaacagtggtcaccaccttgtaactgatgcttttgtgttcagcttctgtacttggatcagctaggaatgtcatctaagtatgacacaaagacctactgcagacagaccttgattggagggaactatggtctgctcaacacaacaacgtttgaaccaaaccctgattactacagagtgctttactatggaaccgcctcatgggaaccaaggttctctcggcaacattcaacggcaccaacaagatccgcgcttacgcacattgcgcaagagattcagggatcactctactcctgatcaacctcagagaagagtaccatctcacccccaaagatgggagcctgcagagccagcatgtgctgctgaatggcaatgtgttggcacctgatgccaatggagagatccctaagctggagcctgtgcaggtggagggaacacagcccataacagtggctccttactccattgtgtttgctcatattcccagattctatgctcctgcctgtaggtag

SEQ ID NO: 42 - protein, 486 aa, Oryza sativa
MAAGLLLKLVGFCFWAVFWLGGAATVSTNAGGEAAAAAVVVDARSAIAVTDEDFVCATLDWWPPDKCDYGTCSWGLATLLNMAFSPLKLRLGGSLQDVLIYDTGDPRQPCTPFTKNSSAMFGFTQGCLPLHRWDELNAFFQKSGIIFGLNALNGRVPMSDDSLGGPWNYTNAASFIRYTVSKGYDIHGWELGGNELSGSGVGARVDADQYAQDVLALKQIIDNSYQGHASKPLVIAPGGFFDAAWFTELISRTKPNQMDVMTHHIYNLGPGVDTHLIDKILDPSYLDGEAGTFSSLQGILKSAGTSTVAWVGEAGGAYNSGHHLVTDAFVFSFCYLDQLGMSSKYDTKTYCRQTLIGGNYGLLNTTTFEPNPDYYSALLWNRLMGTKVLSATFNGTNKIRAYAHCARDSGITLLLINLREEYHLTPKDGSLQSQHVLLNGNVLAPDANGEIPKLEPVQVEGTQPITVAPYSIVFAHIPRFYAPACR

SEQ ID NO: 43 - DNA, 1114 bp, Oryza sativa
atgttcgggcgcgcgccgaagaagagcgacaacacgcggtactacgaggtgcttggggtgcccaaggatgcgtcccaggatgacctcaagaaggcgtaccgcaaggccgccatcaagaaccaccccgacaagggcggagaccccgagaagggtggtagcagtaggggcaggagacagcgtaggggagaggatgtggttcaccctctgaaggtttctctggaggaattgtacaatggcacatcaaagaagctctccctttctcgcaatgtgctctgctccaagtgcaatgggttctgtgctcatcttgcagcaagggctcgaaatctggtgcttccatgaagtgctctggttgtcaaggttctggtatgaaggtccaaattcgccagttggggccaggaatgattcagcaaatgcaacatccctgcaatgagtgcaagggaactggtgagaccatcagcgacaaggatagatgcccaggctgcaagggtgagaaggtggcgcaggagaagaaggttcttgaggtggtggtcgagaagggcatgcagaatggacagaagatcaccttccctggtgaggctgatgaagcggcccgatactgtcactggagacattatcttcgtcctccagcagaaggagcatcccaagttcaagagaaagggagatgacctcttctacgagcacaccctgaacctcactgaggccctttgtggcttccagtttgttctcactcacttggacaacaggcagctgcttatcaagtccaagcccggtgaagttgtcaagcctggattcattcaaggctgtcaacgacgagggcatgccgatgtaccagcggccattcatgaaggggaagctctacatccacttctccgtggaattccccgactctttgaaccctgaccagtgcaaggccctggagaccgtcctcccgccaaggccggtgtcgcagtacaccgacatggagctcgacgagtgcgaggagaccatgccgtacgacgtgaacatcgaggaggagatgaggaggcggcagcaacagcagcagcaggaggcatacgacgaggacgaggacatgcacggcggcggcgcccagcgcgtgcagtgcgcgcagcagtaa

SEQ ID NO: 44 - protein, 370 aa, Oryza sativa
MFGRAPKKSDNTRYYEVLGVPKDASQDDLKKAYRKAAIKNHPDKGGDPEKGGSSRGRRQRRGEDVVHPLKVSLEELYNGTSKKLSLSRNVLCSKCNGLCSSCSKGSKSGASMKCSGCQGSGMKVQIRQLGPGMIQQMQHPCNECKGTGETISDKDRCPGCKGEKVAQEKKVLEVVVEKGMQNGQKITFPGEADEAAPDTVTGDIIFVLQQKEHPKFKRKGDDLFYEHTLNLTEALCGFQFVLTHLDNRQLLIKSKPGEVVKPDSFKAVNDEGMPMYQRPFMKGKLYIHFSVEFPDSLNPDQCKALETVLPPRPVSQYTDMELDECEETMPYDVNIEEEMRRRQQQQQQEAYDEDEDMHGGGAQRVQCAQQ

SEQ ID NO: 45 - DNA, 345 bp, Oryza sativa
atggacatcatcatcatcatcatcatcaccacaatcatcttgatcatcactgtaacatgcgtcatcatcgttgaagagcgatccaccctggccttctccttctccaccatcagagcatggatccggtgcgacatggcgccgatcatggccatcctgcggcggagggaggcgacgatgaggagcctggccctgacggtgctggccttgctcctcacgatcgtcgccgccttcttcagaagctccggagccttgccaattttcatctttgaggttgaaggcaaggaagaagaagaagaggaggaagaagagatggatctgtcaagaacagcagctaagtatctgtag

SEQ ID NO: 46 - protein, 114 aa, Oryza sativa
MDIIIIIIITTIILIITVTCVIIVEERSTLAFSFSTIRAWIRCDMAPIMAILRRREATMRSLALTVLALLLTIVAAFFRSSGALPIFIFEVEGKEEEEEEEEEMDLSRTAAKYL

SEQ ID NO: 47 - DNA, 1497 bp, Oryza sativa
atggtatctgagaaacaacagcccaatacaccagatcaatccttttcttcaacaacatccaaaggtacattcaaaaggatcggcaagagacaaatcatggacatccttgatatgcacccaatcattataacatcgcttcggtctaaaatgaaactatttctgagcagcaaaccttcgagggcagggcagccggcgatgatgctatggagggaagtttcggagattttcacctgccgtaatgagagcagctttgagatgggggaactggagcatcaggtcggtgcaatcagggacgcggcattggctgaaggcagcgacgcggagggtgttggagaagcggaaaatggatggcggcagcggaaggagttgtctcatatagcagaggtcttctgtgaactcgagctcctcgaggttgttgaaccttggcgatgtcagccagccttcgaccatggcggggcgctcgtggatctgctgcgcggggatgcagaagcggcgtacgggccccgcatgagcgaggagtactggggttctggtcttaccgccgtccttgctcgggaggagcgagatgatgatgccaagaacggcgtcagggaggtggctgacgaagtcgacgccctcctcgcggccgtctcctccaactccgagcgggcatcggcggcggcggccgcggcggcggaatcggcggatctgcgggctgcatctcctctccaagggcggcgtccggaacacgcggtgtctgtgtcggtggcggcgttgcacgcaccccccgatgagatagatagctacaaggctacagctagccgcgtagccctagcgacgggggagcgggcgcaggccggtgtgcctgtcaacggcggcgaggaaaacagtggaggaaatggcgtcatcgttggttgcggcaggcgctggaagaagcccgtggaagacgggggcgagcgcctgtacatattcagtattctgaatgtatgcaacacagcttttgtgataccgtgggttggccgagcaggaaatgggcgcacacgaaagtttcgtgcggtgctgtttttgaatggcactagcggcgcggaagctggccggtgcaaagatcctgcggtggtggaccatctgggcgtggaggccaggcaaggtagcggcggcgacggcggtggtgtggaggaggctcgtcggccccctctctcccccagcgaccttggatggcaaggaggagcacggtgcgatctagtgatggcggcggcggtagagaaggccggtgcaaaggtgggtggctgcggcaaaggaggaggaggctcatcggctcgctcactctgccggccatctccctctagttctggtgatggcatcgacgatggaaatggccagcgcagaggccggacctggtggcagtggcggaggaggaggaggcataccgcccccctccctcatcctctttatccgccctcccccccgtctcattcagatctggtgatggcggcgacagtgaagatggttgacgcgtag

SEQ ID NO: 48 - protein, 498 aa, Oryza sativa
MVSEKQQPNTPDQSFSSTTSKGTFKRIGKRQIMDILDMHPIIITSLRSKMKLFLSSKPSRAGQPAMMLWREVSEIFTCRNESSFEMGELEHQVGAIRDAALAEGSDAEGVGEAENGWRQRKELSHIAEVFCELELLEVVEPWRCQPAFDHGGALVDLLRGDAEAAYGPRMSEEYWGSGLTAVLAREERDDDAKNGVREVADEVDALLAAVSSNSERASAAAAAAAESADLRAASPLQGRRPEHAVSVSVAALHAPPDEIDSYKATASRVALATGERAQAGVPVNGGEENSGGNGVIVGCGRRWKKPVEDGGERLYIFSILNVCNTAFVIPWVGRAGNGRTRKFRAVLFLNGTSGAEAGRCKDPAVVDHLGVEARQGSGGDGGGVEEARRPPLSPSDLGWQGGARCDLVMAAAVEKAGAKVGGCGKGGGGSSARSLCRPSPSSSGDGIDDGNGQRRGRTWWQWRRRRRHTAPLPHPLYPPSPPSHSDLVMAATVKMVDA

SEQ ID NO: 49 - DNA, 416 bp, Oryza sativa
  misc_feature (372)..(372): s = guanine or cytosine
atggggcggcggtggcggctggggttctcaccgccggctcaggtggtggctgagaccggctgaaaggaggcctccctgttgtgtctgacagaccaagcatgtgcgcctttttcagcagcggcacggaccatcagctgctacgatcgttggtgaaccccggagaggaggtcatcctcaccgtcccgaacgaacaactggagcatgtcgtgcggttcctcctgggaactaggatcacgcgcatcatgaccagcgacgacgtcctggttaggtccctcgggaatgcgtatttcctcgtccccacgatggttaacctccaccccacgctcgcggcggcgcgcctggacggccgcgtgaaggtgtcgagcgcgtgcsgtgccgccaaagcttgttccgtcggccgactcagccgcaaatag

SEQ ID NO: 50 - protein, 137 aa, Oryza sativa
  X_region (124)..(124): Xaa = any naturally occuring amino acid
MGRRWRLGFSPPAQVVAETGKGGLPVVSDRPSMCAFFSSGTDHQLLRSLVNPGEEVILTVPNEQLEHVVRFLLGTRITRIMTSDDVLVRSLGNAYFLVPTMVNLHPTLAAARLDGRVKVSSACXAAKACSVGRLSRK

SEQ ID NO: 51 - DNA, 1128 bp, Oryza sativa
atgccttacctaacagcggtgtggcaaaactcacttttgtatcgtgagaatgacaaggtagtccggatgaaacacacaccaatccaactcgataggtacatgagcacatctagctgcatcaatcagcatatctggaattctcaagctagcaagcatgcgtgcaccgatcagatgccacaggaccaaagctgcattggccacagctgttattatgctcaagaaacaagcaagaagctagcaaaaccgcacacgtacggttttcagggacacatttacgtatacacacatacgcaccactatataggagcacacagcacagtcgggacatggtcaccaaacaactggagcctattcagttttggaaggtttttgatgccggagagagactctatcctgctcaaggtccaggttatcttctccatcttaggcacagctccgtcagtgaaggtgattttgtttatggcagggcagtcgacatctcttctcaacgtcattggcaagcagctaagcagtcagatgcagcaagtgtccaaatccaagcagcagcaagcaaccattacaaagtccaaatccaacaaggcagcacgagaagtagcagccgccggcagtaacttacctcatcctcagctcgtcgtagtccatcctcgtctctgctgccggtcgacccgtcgtcatcaccttcgcgccggttgctgtcagatccgtgctcgccgtcgtctgctgttggtcgcctcccgccgctggtcacgccggcacgctgcccatcgcaagccgtcattctccgtcgtcaatcgtgggaggctgccactggccccatcgccagtctgtgccactcctcccgccggcttttgtccttgtgcccgccgcccgtcgcggcgccccatccaggctgtcgtcgtgacaatttgtccccatgtctgcatctgcctccccattggaactggccttcattgtcacttcatcgtctccatgtcggagcttgtcatcatgatcatcatcaatcagcgaaggtccgaagaacagtttgtgaagggccttcatcaacatcatcatcagtcaaaggaccgaagaacagtttgtgaagttccattgtcatcatcatcatcaaccacatttccaaatcaataa

SEQ ID NO: 52 - protein, 375 aa, Oryza sativa
MPYLTAVWQNSLLYRENDKVVRMKHTPIQLDRYMSTSSCINQHIWNSQASKHACTDQMPQDQSCIGHSCYYAQETSKKLAKPHTYGFQGHIYVYTHTHHYIGAHSTVGTWSPNNWSLFSFGRFLMPERDSILLKVQVIFSILGTAPSVKVILFMAGQSTSLLNVIGKQLSSQMQQVSKSKQQQATITKSKSNKAAREVAAAGSNLPHPQLVVVHPRLCCRSTRRHHLRAGCCQIRARRRLLLVASRRWSRRHAAHRKPSFSVVNRGRLPLAPSPVCATPPAGFCPCARRPSRRPIQAVVVTICPHVCICLPIGTGLHCHFIVSMSELVIMIIINQRRSEEQFVKGLHQHHHQSKDRRTVCEVPLSSSSSTTFPNQ

SEQ ID NO: 53 - DNA, 207 bp, Oryza sativa
atggctttatcagttaatatgagaggatgggatccaagcttgctggtcacaagatacgagcagactactacaagctacaactgttctgaaacctttgatggaaagatcccacccagtagctgtgtgttagtcgatatcatattggttggtcgacttatacagtgtgttagtcgagctcataagaaaaaaaagcttctttacgactaa

SEQ ID NO: 54 - protein, 68 aa, Oryza sativa
MALSVNMRGWDPSLLVTRYEQTTTSYNCSETFDGKIPPSSCVLVDIILVGRLIQCVSRAHKKKKLLYD

SEQ ID NO: 55 - DNA, 828 bp, Oryza sativa
atggcctcctgcgacgacgacttcggtctcctcggtgacgagtaccgcaaggaccgggaggagtggacggacggcgccatcagcagcctcctcgactcgtacacggaccggttcgagcagctcaaccgggggaacctgcggggtcgggactgggaggacgtcgccgccgccgtgaccgacgggcagggcaagagcagcgggggcaagagcgtggagcagtgcaagaacaagatcgacaacctcaagaagcggtacaaggtggagtgccagcggctcgccggctcgggggcctctgccgtcagccactggccctggttcaagaagatggagcagatcgtcggcaactcgtcaaatccaaaatggaaaagggtgcttctcaagattgggggcacagcattggctggagcgcctcctcaaaatgttgatcctaaggtaattatgctgattgcccgagaagttcaagtggcatgccgccatggtgttgaggtgtcaattgttgtgggaggtcggaatatattctgcggcgacacttgggtttctgcaacgggcactgatagagcttcaacatactcaatcggtttgagcacatctcatttagggagttagcggctagaggattcagcagaatggatatgacagcgattacatgttgtcaggaaaataatattcctggttgtcatcttcaacatgttagagcctggcaatatctccaaagcaatttgtggggatcaagtaggtacattagttgaccaatcaggaaggattacataaactttaagaaggttagctgcggtagagcattgggtcatgcccgtactatgggggtag

SEQ ID NO: 56 - protein, 211 aa, Oryza sativa
  X_region (202)..(202): Xaa = any naturally occuring amino acid
MASCDDDFGLLGDEYRKDREEWTDGAISSLLDSYTDRFEQLNRGNLRGRDWEDVAAAVTDGQGKSSGGKSVEQCKNKIDNLKKRYKVECQRLAGSGASAVSHWPWFKKMEQIVGNSSNPKWKRVLLKIGGTALAGAPPQNVDPKVIMLIAREVQVACRHGVEVSIVVGGRNIFCGDTWVSATGTDRASTYSIGLSTSHLGSXRLEDSAEWI

SEQ ID NO: 57 - DNA, 2853 bp, Oryza sativa
  misc_feature (400)..(400): k = guanine or thymine
atggggaagctgttcatggtgctggagaaccagtacaacaagcacaaggtcctcgagcaagaaatcagctccctccagcaagagttccgcatgattgccgccgtcatggacgaccagctcctttctatgggcaggagcgaagcacgcacatctgttgcatggctgcacaacgaggagatgctcgatcttgagcatgacattgaggactgcgtcgaccgtttcatgcacctcctcacctgcaagcatcatcgtggtggggtgcgccagatggcacatgaggtaaagatccgctcgagcttcagtgaagagatccagaagctcaggaggcgcctcagtgaggtgcgccatctggtgggcattaggcagcccatggaggagctcctctcgctgctagatgaaktggagggcgagccaaagcatttaagggtgacccccaccgtggggttcagtggcttggggaagaccaccctcgccaaggcggtctacgatagccctcatgcaaaggataaattctgcctccgtgcgtggatcaccgctgatggctcaccggaaacgagcaattggatgaaggagatcctgcgcggtgtactccagcaagtgcgtcccggcgatgccatggatgtcgatggccagcatcttgaagcctcgctcaaggagtacctcaaggacaagaggtatttaattatcatcgatgacatcaggatggatcaatggaggatcataagttcagcctttgaaaataatggtacaggcagcaggatattacttaccacaactattcagtcagtaactaataggtgcagccatggcaatggttatgtgtatcaaatgaacacacttggtaaagaagactctgaggaactagctttttcagtgcttagatcacctgagttggagaaccattcagaatcattactagggaaatgtgatggtcttcctcttgctctggtcagtgtctctgattatctgaagagctcaactgaggcaacgggagagttgtgtgcaaagctatgccgtgatctgggttctcatctgacaggaaaccatggccatgacaacttttcagaactcaggaaggtgcttcttggcaactatgacagtttttccggctctgctctgagttgcttgctgtatcttggtatattcccaaacaatcatcctctcaggaagaaagttctaatccggcggtggttagctgaaggaaacgcaagaagtgatgacccttggcgcagtgaagaggacactgcagatgacaatttcagtaaccttattgaccagaatatcattcagccagttgacacaagaaacaattctgaagtgaagacgtgcaaaactcatggaattatgcatgaatttttgctgaacaggtccttggccaagagattcatcacgacatcaccgcatgatccaagagttggaatcaatactaccaattcacgccacctttctgttgatgctgctaaacagacaaaatgcatggcatctgacgaggaattatctcgagtccgatctctgacaatctttggggatgcaggtgatgcaatttcttatcttcacaagtgcaatctgatacgagtcttggatctacaagaatgcagtgatttgaacgataatcatctgaaacgcatatgtgtactgtcaccgtggcatctgaaatacctgaaccttgggggcaatatcagtgagcttccaaggagtattgaagggctgcattgtttagagacactggatttaagggaaacagagataaagtttttgcccattgaaggtatcatgctgccccacttagctcacttgtttggaaagtttatgcttcacaaagatgatctgaacaatgtgaagaagataagtaaactattaaaattgttttcatcaaataaaagcaacttgcaaactttagcaggatttatcactgacgggaggaaaggatttcttcaacttattggtcatatgaaaaaactgaggaaggttaagatatggtgcaggcatgttgaaggtagcagtaattacattgctgatctttcaaaggccattcaggaatttaccaaggctcccattgacatggacagagtccgttctctctcaattgattccgaagaatactgtgaaaaattcctaagttcacttgatttggagccatgctctgaatattcgaaataccatctaagttcactaaagatacatggcaagttactccggttgcctccattttttagttctttgtcaggtctcattgatctgtgtattacaccagctactctgacacaagatcatctatcagcactgataaatctgaacagactgctgtacctcaaactgattgctgacaagctcgagaatttagagataaaacatgaagcactactgagcctgagacgcctgtgctttgtggtgaaaagtgtggcgttagcgcagccaaaaatcgagcaaggagctctaccaaaccttgtttcacttcagctgctctgtcaaggactagttggtctttccggcatcgagatcagacacctgaaaaatctcaaggaagttacgattgactctggagtgactgcgcaaacaaggcaagattgggaacaagctgcaaagaaccaccctaacaggcctagagttttgttgctcggaaaggttgatccagtggaaagcgaggaaccgggaagaccctgtgccataagggggagggggaaaagttctataggccaagaaagttcagaagatggttcagattctagccttaagaggatgagacttgcagagccttcttcttcttcgcagcttcaggtgaccggccatccgcatccggtggtggtagcagccaccgaagcagcatcccagccttccatggcaaatctctag

SEQ ID NO: 58 - protein, 950 aa, Oryza sativa
MGKLFMVLENQYNKHKVLEQEISSLQQEFRMIAAVMDDQLLSMGRSEARTSVAWLHNEEMLDLEHDIEDCVDRFMHLLTCKHHRGGVRQMAHEVKIRSSFSEEIQKLRRRLSEVRHLVGIRQPMEELLSLLDELEGEPKHLRVTPTVGFSGLGKTTLAKAVYDSPHAKDKFCLRAWITADGSPETSNWMKEILRGVLQQVRPGDAMDVDGQHLEASLKEYLKDKRYLIIIDDIRMDQWRIISSAFENNGTGSRILLTTTIQSVTNRCSHGNGYVYQMNTLGKEDSEELAFSVLRSPELENHSESLLGKCDGLPLALVSVSDYLKSSTEATGELCAKLCRDLGSHLTGNHGHDNFSELRKVLLGNYDSFSGSALSCLLYLGIFPNNHPLRKKVLIRRWLAEGNARSDDPWRSEEDTADDNFSNLIDQNIIQPVDTRNNSEVKTCKTHGIMHEFLLNRSLAKRFITTSPHDPRVGINTTNSRHLSVDAAKQTKCMASDEELSRVRSLTIFGDAGDAISYLHKCNLIRVLDLQECSDLNDNHLKRICVLSPWHLKYLNLGGNISELPRSIEGLHCLETLDLRETEIKFLPIEGIMLPHLAHLFGKFMLHKDDLNNVKKISKLLKLFSSNKSNLQTLAGFITDGRKGFLQLIGHMKKLRKVKIWCRHVEGSSNYIADLSKAIQEFTKAPIDMDRVRSLSIDSEEYCEKFLSSLDLEPCSEYSKYHLSSLKIHGKLLRLPPFFSSLSGLIDLCITPATLTQDHLSALINLNRLLYLKLIADKLENLEIKHEALLSLRRLCFVVKSVALAQPKIEQGALPNLVSLQLLCQGLVGLSGIEIRHLKNLKEVTIDSGVTAQTRQDWEQAAKNHPNRPRVLLLGKVDPVESEEPGRPCAIRGRGKSSIGQESSEDGSDSSLKRMRLAEPSSSSQLQVTGHPHPVVVAATEAASQPSMANL

SEQ ID NO: 59 - DNA, 1692 bp, Oryza sativa
  misc_feature (159)..(159): s = guanine or cytosine
  misc_feature (165)..(165): m = adenine or cytosine
atgctccacctcctcccgctgctccgcgcccgcgccgccacccatttccccacctcctctctggacctcagccgccgccgccgcctcctcctctccaccgccgccagatccgccgccgcgacccccttctctgtcgaggagtacctcgtcgacacctgsggcctmacgggcgcccaggcgctcaaagcatccaagaagctctcccacctcaggtcgcccgccaagcccgacgccgtgctcgccgtcctctccggcgtcggcctctcccgcgccgaccttgccgccgtcgtcgcctccgacccgcagctgctctgcgccagggccgacaacatcgcccgccgcatcgcctccctgcgcgaccgcgtgggcttgtcggacccccagatcggcagcttcctcctcgcgggcggcgccaagggcatccacgcgtgtgacgtcgcctcgaggctggagttctggatccccttcttgggatccttcgagacgctcctcaggatcttgaaggggaacaacgtgctggtgctctctgaccttgagaaggtgatcaagcccaacatcgcgctgctccaggagtgcgggctaactgtttgtgatattgccaagatggccaggtttgctccacggatgttcacgtccaatccaaagcaggtggaagggtttgtgcggcgtgccgatgagcttggcgtgccacgcacctcaggccaattcaagtacatggtgggtatttttgctaacatcagcgaaggcagtgccaccgcgaggatggagtacttgagtcgcagtcttggttgctccatggacaagctccgctctgcggtccaaaagttaccacaaattctaggattatctgagacaaatcttggcagcaagatagagttcttggtcggcaaggtcagattggagcctgaataccttttgaagacgccaaagctgttcacgtacagcttggagaagcggttggtggcgaggcattatattgtgcaagtccttgctgcgaagggattgaagggattgaaaaaagatgttcccttttgctcatatgtacagctaggcgaaagttgttttgtaaaaaacttcattgatcagcacgagaacgttgtccctggtctttctgatgcctatgctgcacttcgtgctgggaaagtgcctccagagtgcccttacagccttactgctgatgcaatgacttgtttcttgaaccactattctcctgttcagagtgccactcatagacaggcatatggatcaagtgattgtttgtttggcaccattatggaggcactggaaatggcactggttcatcatttagcaaatgtgcctcgatgcaactctttctctggttctgttgtccagcattattacagtattcctgctttaattgtggatattatgatcttcacccagggaattgcacaacccaaggcatatatctatttgaatgtgggcaatgctagaaagtcttacattgtgaaacggaggaacctggagaagcggttggtgccgaggcattatgttgcagaagcccttgctgtgaagggattgataagaaaaggtcttgacttctaccattgtgtatgtatgcgcgacgaagtttttgtagcaaagtacattgatcactatgaggatgctcttcctgggctcgctgatgcctatgctgctgttcgtgctgggaaattgcctgcacaagtctaa

SEQ ID NO: 60 - protein, 563 aa, Oryza sativa
MLHLLPLLRARAATHFPTSSLDLSRRRRLLLSTAARSAAATPFSVEEYLVDTCGLTGAQALKASKKLSHLRSPAKPDAVLAVLSGVGLSRADLAAVVASDPQLLCARADNIARRIASLRDRVGLSDPQIGSFLLAGGAKGIHACDVASRLEFWIPFLGSFETLLRILKGNNVLVLSDLEKVIKPNIALLQECGLTVCDIAKMARFAPRMFTSNPKQVEGFVRRADELGVPRTSGQFKYMVGIFANISEGSATARMEYLSRSLGCSMDKLRSAVQKLPQILGLSETNLGSKIEFLVGKVRLEPEYLLKTPKLFTYSLEKRLVARHYIVQVLAAKGLKGLKKDVPFCSYVQLGESCFVKNFIDQHENVVPGLSDAYAALRAGKVPPECPYSLTADAMTCFLNHYSPVQSATHRQAYGSSDCLFGTIMEALEMALVHHLANVPRCNSFSGSVVQHYYSIPALIVDIMIFTQGIAQPKAYIYLNVGNARKSYIVKRRNLEKRLVPRHYVAEALAVKGLIRKGLDFYHCVCMRDEVFVAKYIDHYEDALPGLADAYAAVRAGKLPAQV

SEQ ID NO: 61 - DNA, 1230 bp, Oryza sativa
atgccaattaaaatccctggagactctaagattgaaattcaaaaccgaagcagaaacttgacagtttatgccagcaaagttgttgatagtgtggcatataatgctatgttgtcatatccggaaggtcaacaagagaaatgtgtagcagtgtgtagaagattggaacatgctcatgcactttttgacatccttgcaagttgctcccacagcaacatcattgaacctattggaatttgggaagaaaaggggacgaagctggcatatattgtttttccatgctttgatggaccactgagtttaattccaacagaagaaatatttgatgtggaggatgccacgaatgacaaatcttatacatttggcttcactgaccaaggatgcaaaatttttgtagaaatgtttatggccgtcaaatatgtcaatgacctatatgatgatgaacaaatacctttgaaggcattgaattttgatgaaagtaaaatattttaccagttgaacgctcagcgggactaccgtgtcctgttaactgacttcaagttggagatttcaccaaccggtaatgcgagaaataaccggaaaggcaagggtaaagcttctagcacagtaccaactgttgatgagctaaaggttgcaaattggaatggtttggggcagcttcttcaaaagctccataaaaaccttggacttcacgcagaactaaaccattttgctgaacttcttgggaaaaaaacagtaaagtatgaagatctggtgtgggaagctggattatgggaacataacagcaaagtgcaatttatcagggagatatattggcactataacaacgatgaggcaaaaatatcccagcttaagcttagagcatctcttggtctcaaaagctgcattgacaagttggaggtgaacaaatcaagagagccaaacaaagaaatcaatgacaaaagcttgtataactccttattcttcctcagagtttacatggttgcacaccgagacgatttaatcaaaggatacagtggagcaaaggaaacagtggaggacaggaaagccgttgtgaggctgctgatgaaagagtgccctacatatatggtgaaactcattgcagaaatacgtcatttaggctggattaaggaatcaccatttttgcggactgctcttaggaaaagtgctgatgaaggaaactttggtacaaatgacatttcgtttttaacatggtctggaaagttgcactaa

SEQ ID NO: 62 - protein, 409 aa, Oryza sativa
MPIKIPGDSKIEIQNRSRNLTVYASKVVDSVAYNAMLSYPEGQQEKCVAVCRRLEHAHALFDILASCSHSNIIEPIGIWEEKGTKLAYIVFPCFDGPLSLIPTEEIFDVEDATNDKSYTFGFTDQGCKIFVEMFMAVKYVNDLYDDEQIPLKALNFDESKIFYQLNAQRDYRVLLTDFKLEISPTGNARNNRKGKGKASSTVPTVDELKVANWNGLGQLLQKLHKNLGLHAELNHFAELLGKKTVKYEDLVWEAGLWEHNSKVQFIREIYWHYNNDEAKISQLKLRASLGLKSCIDKLEVNKSREPNKEINDKSLYNSLFFLRVYMVAHRDDLIKGYSGAKETVEDRKAVVRLLMKECPTYMVKLIAEIRHLGWIKESPFLRTALRKSADEGNFGTNDISFLTWSGKLH

SEQ ID NO: 63 - DNA, 777 bp, Oryza sativa
atgattttttgccaaaagccaaattgggttttcgctggcggccgacggtgccgccggggaccaaatgccagtgaaaataatgcatttgtgcagtcggacagcctgccgccatggaaaatcggccatgctaagacagccgccagcgaaaatgggttttctttcttgccgtcatcgagctgccatcgtggaagtgatgttgagcacaccgttcttcatgtacttgtagatgagcagctgcttgtcattctcctcacagtagccaacgaagacgacaaggtgcttgtggtagagccgcgtgaggaaggccagctccgactgatggtggataaaaagctcggactccggccagatccacggcccatgatgtcgctcgccaaagtccacgacctgacccgccgcttgccaaacctggtgtggcaagatttttcgctggcgatgctctatagtagccgcctgcaaaaatcgaattttcgctattttcgctggcggacgtttaagtgggcagccaacgaaaagccgccgtgcaccgctcctctatcccgtggcagcctcgcaccgcctgagatgttccgttgcaatgacagcctggagacggttcaggaagcccatccagtcggcgaggagatagagtgccgccggccacaaatagagaacggccggaggaagaagaagaagaagagagagagactgaccggtcttgaggactcttatgagattttgaatattaccaatcaatctcaggacatcgagcaaggcaagttattgttcacctcttga

SEQ ID NO: 64 - protein, 258 aa, Oryza sativa
MIFCQKPNWVFAGGRRCRRGPNASENNAFVQSDSLPPWKIGHAKTAASENGFSFLPSSSCHRGSDVEHTVLHVLVDEQLLVILLTVANEDDKVLVVEPREEGQLRLMVDKKLGLRPDPRPMMSLAKVHDLTRRLPNLVWQDFSLAMLYSSRLQKSNFRYFRWRTFKWAANEKPPCTAPLSRGSLAPPEMFRCNDSLETVQEAHPVGEEIECRRPQIENGRRKKKKKRERLTGLEDSYEILNITNQSQDIEQGKLLFTS

SEQ ID NO: 65 - DNA, 2499 bp, Oryza sativa
atggcgccgccctgctcctctgctctcgttcttccttgcctgcttgtcatagccatggccgctctgcaaagtgctgtggtgtttgccgataccgtcactgccaaacgcccgttgtccggcagccagagtgcactggtgtccaagcgtcgcaagttcgcgctcggtttcttccagccagaaaattcacagcattggtaccttggcatctggtacaaccaaatttccaaacacacacctgtctgggttgcaaacaggggcactccaatctcgaatccggacacctcacaactaaccatagcaaccgacggcaacatggtattactcgacaattcaacaactgcaatttggtccacgaacatctccaagatcgcctccaactccacggtcggtgtcatcctcgacaccggcaaccttgtcctcgcagacgaatcgaacacctccatcatccactggcagagcttcgaccatttcggcaacacctggctccccggcggcaagctcggccggaataacaagctcgccggcgtgagcacccgtctggtcgcatggaaggctcgcaatgacccatctccaggcgtcttctccctcgagctggatccgaatggcacgagccaatacctgctcgaatggagcatcacgcagcagtactggacgagcggcaactggactggccgcatattcgccgacgtgccggagatgacgggatgctacccgagctcgacgtacaccttcgactacgtcaatggcgagaacgagagcgagagctacttcgtgtacgacctcaagggcgagtccgtcctcacgaggttcttcctgagcgagatggggcagatccagttcttgacatggatctacgcagccaaggactggatgccgttctggtctcagcccaaggtgaagtgcgacgtgtactcgctgtgtggcccgttcagtgtctgcaccgagaacgcactgacatcttgtagctgcctccggggattcagcgagcagaacgttggcgagtggttgcagggagatcacacttcagggtgcagaagaaacgtcgagctgcagtgtagcagcaatgcctcagtgatggggaggactgatggtttctacacgatggccaacgtgagattaccaagcaatgcagagagcgtggtggtcataggaaatgatcagtgtgagcaagcatgcttaagaagttgttcttgcactgcttactcctacaacggcagctgctcactgtggcatggagacctcatcaacctgcaggatgtgtctgccattagtagccaaggaagcagcactgttttgattcgcttggccgcttcagaattgtctggccagaagcagaagaacaccaagaacttgatcactattgccatcgttgctactagtgttctagtactcatgatagctgctttgtttttcatcttcagaagaagaatggtaaaggaaacaacaagagtggaaggttccttgatagcattcacataccgtgacctgaaatctgtgaccaaaaatttctccgagaagctcgggggaggcgcattcggtttagtgttcaaagggtcgctacctgatgcgaccgtggtggccgtgaagaagctcgaaggttttcgtcagggggagaagcagtttcgcgcggaggtgagcacgatcggcaacatccaacacgtcaacctgattcgattgctcgggttttgctcggagaaatcgcgaaggctactcgtctacgagtacatgccaaacggttcactggacaagcaactttttgacaataaaaaacatgtcctgagttggaacacgaggtaccagattgctcttggaatcgcgaggggattagactacctccacgagaaatgcagggattgcatcatacactgcgacatcaagccagagaacatactgctcgatggctcgtttgcacccaaggtcgccgacttcgggctcgccaagctcatgggccgcgacatcagccgcgtgctgaccacggcgaggggcacggtggggtacatcgcgccggagtggatcgccggcacggccgtcacggcgaaggcggacgtgttcagctacggcatgacgctgctcgagatcgtgtcggggaggcggaacgtgcagggacgacggaggaggcaggagcagcaggacgacggcggcgcggcggcggaccgcccattcccgttggtggcggcgggcaggctcgtcggcggcggcggaggccggcgggaggagctggtcagcgccgtggtggacggccggctcggcggcgacgccgacatgggccaaggcggagagagcatgcagggtggcgttctggtgcatccaggacgacgagaacgcgaggccggccatggcgacggtggtgcaggtgctcgaagggctcgtggagatcggcgtcccgccgattccgagatcacttcagttcctcgcggagttggccgatcaatcaaattacttgcagttcttctccgatttattaccgtcgaattgaggtccttgcaggtgcaggcttga

SEQ ID NO: 66 - protein, 832 aa, Oryza sativa
MAPPCSSALVLPCLLVIAMAALQSAVVFADTVTAKRPLSGSQSALVSKRRKFALGFFQPENSQHWYLGIWYNQISKHTPVWVANRGTPISNPDTSQLTIATDGNMVLLDNSTTAIWSTNISKIASNSTVGVILDTGNLVLADESNTSIIHWQSFDHFGNTWLPGGKLGRNNKLAGVSTRLVAWKARNDPSPGVFSLELDPNGTSQYLLEWSITQQYWTSGNWTGRIFADVPEMTGCYPSSTYTFDYVNGENESESYFVYDLKGESVLTRFFLSEMGQIQFLTWIYAAKDWMPFWSQPKVKCDVYSLCGPFSVCTENALTSCSCLRGFSEQNVGEWLQGDHTSGCRRNVELQCSSNASVMGRTDGFYTMANVRLPSNAESVVVIGNDQCEQACLRSCSCTAYSYNGSCSLWHGDLINLQDVSAISSQGSSTVLIRLAASELSGQKQKNTKNLITIAIVATSVLVLMIAALFFIFRRRMVKETTRVEGSLIAFTYRDLKSVTKNFSEKLGGGAFGLVFKGSLPDATVVAVKKLEGFRQGEKQFRAEVSTIGNIQHVNLIRLLGFCSEKSRRLLVYEYMPNGSLDKQLFDNKKHVLSWNTRYQIALGIARGLDYLHEKCRDCIIHCDIKPENILLDGSFAPKVADFGLAKLMGRDISRVLTTARGTVGYIAPEWIAGTAVTAKADVFSYGMTLLEIVSGRRNVQGRRRRQEQQDDGGAAADRPFPLVAAGRLVGGGGGRREELVSAVVDGRLGGDADMGQGGESMQGGVLVHPGRREREAGHGDGGAGARRARGDRRPADSEITSVPRGVGRSIKLLAVLLRFITVELRSLQVQA

SEQ ID NO: 67 - DNA, 1068 bp, Oryza sativa
atggccgagaaacaaccaccaccaccatctagcccaggttctgttaaaggcaaggcattgaagttgggattgactgacatcattgaagaaaacgttatgccgatcgatccagagaaattcacgcctgagcagaaggaagagtttgaagcaacgttgcagcaagcacgggatcagtttctgaactcattcatgcagacccgcaaagggacacttgttcagaagtataaaataaaagtggttgctgatagtcctaggaccggttcttctaaagatggagaagtgaaacaagctccaggcggctcggctcagccgagtaccaaaggtgctaccaacggctctctaggcgatcaaggtgacaattctcaaggagttcatggcgttcaaggtgatggtgctcaggggccacaaggaggaaatcttaatcagaatagcgaagtagcgcaggactttttcaataacttccaagatcgggttgattacgccgtgcatcatgctttgatcaatcagtccagggtattagtcaataccttgtcaaacatgatgaagacaatagccgatagttcaatagctaagcatcaggccgcatgcccagtttatttgcaaggaggtgtcttcccaaattatcgatctttgatcaccgatgttcagccatctattcaagcagttccctccgttgcacccacaactcagccgacggcgccagtgtcaactcctctgcctgctacactagctatgacgccaggacagccggtgaaccctcagttgttaatgaggcaacagccacagcatggcgggcaagctgcgaatcggctgacccaagatcaagttgctgccatgtttctgccacctccacctattgttgatccagtgcagcagcagccgattcagcagacaccaccaatccagccggttgtgcaaccaatccaacaacaggtcgtacaaccagctcagcaaacaccaccaagccagcagcctctgcaaccaattcagcaaacaccaccaaggcagcagcctctgcagccgatccaacagactccattaaggcaacaaatcgttcagccgatttag

SEQ ID NO: 68 - protein, 355 aa, Oryza sativa
MAEKQPPPPSSPGSVKGKALKLGLTDIIEENVMPIDPEKFTPEQKEEFEATLQQARDQFLNSFMQTRKGTLVQKYKIKVVADSPRTGSSKDGEVKQAPGGSAQPSTKGATNGSLGDQGDNSQGVHGVQGDGAQGPQGGNLNQNSEVAQDFFNNFQDRVDYAVHHALINQSRVLVNTLSNMMKTIADSSIAKHQAACPVYLQGGVFPNYRSLITDVQPSIQAVPSVAPTTQPTAPVSTPLPATLAMTPGQPVNPQLLMRQQPQHGGQAANRLTQDQVAAMFLPPPPIVDPVQQQPIQQTPPIQPVVQPIQQQVVQPAQQTPPSQQPLQPIQQTPPRQQPLQPIQQTPLRQQIVQPI

SEQ ID NO: 69 - DNA, 2714 bp, Oryza sativa
  misc_feature (65)..(65): m = adenine or cytosine
  misc_feature (70)..(70): r = adenine or guanine
  misc_feature (77)..(77): r = adenine or guanine
  misc_feature (2021)..(2021): w = adenine or thymine
  misc_feature (2460)..(2460): y = cytosine or thymine
  misc_feature (2541)..(2541): r = adenine or guanine
  misc_feature (2704)..(2704): r = adenine or guanine
atgtacaaagtagcgtgcaagaatgggttgatgaaaccaagaggttatttttcctcaggaccacmaacartgtcagraacaacatcactaatggcactactcctctgcgggttggaaatctgcgtcatgatccctcagaagatatcaggagttcaaactatccttccttgtataatcaaagagaaagaggaccatctaattcaattgtaaatagacatgtcgatacagatttggctaagcatcgtgtgatgtatcagtcagcacatgctgtgcctgccccattcagtgttgttaataatgatatcaaaccactgaacatgcttgatggctccaaggaggaaattccttggcacgattccgttacgatggaatcttctctgcctaaagtttccaagtcagagaaaactttggtggttgataaagctatcccagacaaaaaggagcacaaacgcattacaaggaaggtgacgccaaatttcccggacaaagcttccttgtccactgagtcaaaaaatgcacggaagttgcttgctaccatctatgacaaagttttggttgtcgacaatgttgagtcagctaggagtgttgttaaattgcttactacaaagtacaaaggctttattcatgcatgtgacacggaggtggcaaatattgatgtcaaagaagagacgccagttggtcatggagaagtaatatgctttagcatctattcaggaaattctgatggggaggctgattttggaaatggcaaaacatgcatatgggtggatgtgctagatggtggaagggatgttctaatggagtttgctcctttctttgaggacccatctatcaaaaaggttcacttcgattcctcattttattatttttggagtttggcataactatagttttgatatccatgtcattgagaactgtggaatcaaggttgctggatttcatgctgatacgatgcatcttgcacgcctgtgggattcttccaggagaactgatggtggatattcacttgaaggactaacaaatgattacagagtcatggatgctgttctaaaggacatacctaaaactgggaaggtgtcaatgaaaactatctttggccggaaaaaggttagaaaagatggatctgaagggaaaaccatatctatcgagccagtcgaaaagttacaaagggaggatagagagttgtggatttgctattcctcactagattcaatgagtacattgaagctttatgaaagcttgaaaaacaagcttgaagcaaaggaatggattttcgatgattgtcctagaggaacaatgtatgatttctacgaagagtattggcgtccctttggtgctcttcttgtaaagatggaaacagagggagtgcttgttgaccgtgcatacctttcggagattgagaaagctgctgttactgaacgagaattagcagcggataagtttcggaaatgggcatctaagcattgtcctgatgccaagtacatgaatgtgaatagtgataatcaaattcgccaacttttctttggtggcatcgaaaatagagaaataagcgtggtgaaacttggccacaaagtaaaacttttaaagtgccaaatgatgaaggcatagctacagagggcaagaagactccaaagtctcgcacaatcaaacttttcactattgtggaagatcttaaaattgatatgttcaccccgactggttggccttcagtcagtggggacgttttaaggagtttggctggtaaaatacccacagatcatatatataaaattgatgatggccaagagtttgatgaagatgggagcagtttggaacttcctgagcaggatatagaagacacttccccatatggaactgcatatgaagcgtttggtggaggaaagaagggaagggaagcatgtcatgccattgctgctctatgtgaagtcttttctattgacaaattgatatccggcttcattgttccattgcagttgcagaatcaacctgctcttgaaaaggataggtacaagattcgccawgcttttgtcgcagctccagggaacactcttattgttgctgattatggccaactggaactgaggatcttggcgcatcttactaattgtaaaagcatgctggaagctttcaaggctggtggtgacttccattctaggacagccatgaatatgtaccagcatgttcgtgatgctgttgaagaaaagaaagttctgcttgaatggcatcctcaaccaggtcaagacaaacccccagtgccattattgaaggatgcttttggcgctgagaggaggaaggccaaaatgctcaatttctccattgcatatgggaagactgctgttggtctatctcaggattggaattggcaggttgaagttagggaagcaagggatacactcaaactttggcatagggatagaaaggaaatttcagcttggcaaaagaagcagaaagcccttgcgyttgagaagtgcgaagtctacactttgctcgggcgatcacgccaatttcctaatatgactcatgcgggtcctggtcaaaagrgtcacgtcgagcgtgctgctataaatgcaccagtgcagggcagtgcagcagatgttgctatgtgtgcaatgcttgagatagaaagaaacgctcgccttaaggagcttggttggagactcctattgcaggtttatgacaataacactcctacgtttacaaaagraagtacttag

SEQ ID NO: 70 - protein, 903 aa, Oryza sativa
  X_region (22)..(22): Xaa = any naturally occuring amino acid
  X_region (24)..(24): Xaa = any naturally occuring amino acid
  X_region (26)..(26): Xaa = any naturally occuring amino acid
  X_region (70)..(70): Xaa = any naturally occuring amino acid
  X_region (83)..(83): Xaa = any naturally occuring amino acid
  X_region (105)..(105): Xaa = any naturally occuring amino acid
  X_region (673)..(673): Xaa = any naturally occuring amino acid
  X_region (820)..(820): Xaa = any naturally occuring amino acid
  X_region (847)..(847): Xaa = any naturally occuring amino acid
  X_region (901)..(901): Xaa = any naturally occuring amino acid
MYKVACKNGLMKPRGYFSSGPXTXSXTTSLMALLLCGLEICVMIPQKISGVQTILPCIIKEKEDHLIQLXIDMSIQIWLSIVXCISQHMLCLPHSVLLIMISNHXTCLMAPRRKFLGTIPLRWNLLCLKFPSQRKLWWLIKLSQTKRSTNALQGVTPNFPDKASLSTESKNARKLLATIYDKVLVVDNVESARSVVKLLTTKYKGFIHACDTEVANIDVKEETPVGHGEVICFSIYSGNSDGEADFGNGKTCIWVDVLDGGRDVLMEFAPFFEDPSIKKVHFDSSFYYFWSVWHNYSFDIHVIENCGIKVAGFHADTMHLARLWDSSRRTDGGYSLEGLTNDYRVMDAVLKDIPKTGKVSMKTIFGRKKVRKDGSEGKTISIEPVEKLQREDRELWICYSSLDSMSTLKLYESLKNKLEAKEWIFDDCPRGTMYDFYEEYWRPFGALLVKMETEGVLVDRAYLSEIEKAAVTERELAADKFRKWASKHCPDAKYMNVNSDNQIRQLFFGGIENRNKRGETWPQSKTFKVPNDEGIATEGKKTPKSRTIKLFTIVEDLKIDMFTPTGWPSVSGDVLRSLAGKIPTDHIYKIDDGQEFDEDGSSLELPEQDIEDTSPYGTAYEAFGGGKKGREACHAIAALCEVFSIDKLISGFIVPLQLQNQPALEKDRYKIRXAFVAAPGNTLIVADYGQLELRILAHLTNCKSMLEAFKAGGDFHSRTAMNMYQHVRDAVEEKKVLLEWHPQPGQDKPPVPLLKDAFGAERRKAKMLNFSIAYGKTAVGLSQDWNWQVEVREARDTLKLWHRDRKEISAWQKKQKALAXEKCEVYTLLGRSRQFPNMTHAGPGQKXHVERAAINAPVQGSAADVAMCAMLEIERNARLKELGWRLLLQVYDNNTPTFTKXST

SEQ ID NO: 71 - DNA, 2982 bp, Oryza sativa
atggcggacacggggagcctggagaagatggggcgagagctcaagtgccccatctgcctgagccttctcagttcggcggtatccatctcctgcaaccacgtcttctgcaatgattgcctcacggaatcgatgaaatccacgtcgagctgccccgtgtgcaaggtcccgttccgacgacgagaaatgcgaccagcacctcacatggacaatctggtcagcattttcaaaagcatggaggctgcagcaggtaccaatgttgtctcaacacaggaggctcctgtggtaaaacttgcagatggatcagattgtgtcaacagcgggaaaaattccaaaaggtcacaaaaatcattgacacgaaaaaggaaggtaacatccgagatggaaaaaaatacagcaaaggatgctacagcttctgcatcccaacctactacaaagccttccttctctactaacaaaagaatacaagtgaaaccattccctgaatctgagacaccaataagagctgagaagattatgaagcctgaagagccaaaaaataatctgaataatgatgttgaaggaaagaataaagcagtggcatcgggtcaacctggaagtccttcattgtcaccctttttttggctaagggaacaagaagaacaagaaggctgtaccgctgagacgttaagtgaaacgcaatctttagacacacccttgcgtcataatgcaccctcttttagcgatattaaagattctgatgacgaaatccctttaaatacaactccaaatagcaaagctgcggctacagaactctttgacagtgaaatatttgaatggacccagagaccatgctctcctgaattgtattccactccattgaaaaagcagagtaaagctaagagtaaactagatcaaattgaagagaagggtgatgaagaagatgtgcatattggtggttcatttgataagctgggtaatgcaagtaatgcagctcagcttgtcaatacaaaagcaacaaagcagaagagaaagaaaacaagtcccagtaacaaaaacagtgcaaaattgtccaatcgtgctgagccctgcataaaaaagtctgatgccaatcaacaaggttcaaatagacgtaaaagtgctgccctaaaatcttgtcagaaaagcagcagtgctgtagggaggaatacttcaggtagaagaaacaaggcctctagcaacagcaagccaattcatggctctagtgataactccccagagtcatatcttcctaaggagggtttggatgttgaagcacctgacaaacccctttctgaaaggatccaaaacttggagaaaactagtcgacgaaagggaagtgcaaggaagctggaaatggcagggaaaactatttcagatactacagagaagaatagtgagccaagaagtaagagagtcagaagaatgtctgaccacgctatagctaaaccggttgaagttccttcaggatctggaaatgaaacagaaataccacagcttcacaccctcacaaaaggcagcattcaacgcaaatcctccaacgctagaagacatagcaaagtttgtggagaacaggaaggtaagaataaacttgagaacacgacaatgacacctattattttacatgggaaatgccaaaataaagaggcagtatgtacagctccttcagtaaggactgcatctgttaagtacaagcaagcaaaatttagcgaacaaccagattgttttggaacggagaactttggaaaccttcaagcatgccctgcacgtaatgttttactgaagaagtgtgaggtatctactttgaaggtttcctgtgctttctgccagaccgatgtcatcacagaggagtctggagagatggttcattatcaaaatgggaaacaagtccctgcagagttcaatggaggagccaatgtggtgcactctcacaagaactgccttgagtgggctcctgatgtctacttcgaagatgattctgcctttaatcttacaactgaattggcgagaagcagacggatcaaatgtgcttgctgtggaattaaaggagctgcacttggatgctttgagatgagttgtcggagaagtttccacttcacctgtgctaaactaatcccagaatgcagatgggataatgaaaattttgtgatgttatgccctctacatcggtctacaaagttacccaatgaaaattctgaacagcaaaagcaacctaaaaggaaaacaacactcaaaggaataaccggcttttccaggtcatctcaaataggatccaatcaagattgtggtaataactggaaatggccatctggatcaccacagaagtgggttctctgctgctcatcactttctagttctgagaaggaacttgtatcagaatttgcaaagttagctggcgtgcctatttcggcaacttggagtccaaatgttacccatgttattgcatcaactgatctctctggtgcttgcaaacggacgctgaagtttctcatggcaatcttgaatggcagatggattgtctccatagattgggttaaaacttgcatggagtgcatggaaccaattgatgagcacaaatttgaagtcgctactgatgttcatgggatcactgatggtcctaggttaggaagatgcagggttattgacaggcaacctaagctgttcgacagcatgaggttctacctccatggggactacacaaaatcctacagaggctacctgcaagatctcgtggttgcagcaggtggaatagttcttcagaggaagcccgtatcaagagaccagcaaaagcttcttgatgacagctctgacctcctcatcgtttacagcttcgagaatcaagatagggcaaaatccaaggccgaaaccaaggctgctgatcgcaggcaggctgatgctcaggctcttgcttgcgcttctggaggcagagttgtgagcagtgcatgggtgattgactcaattgcagcctgcaatctgcaacctctttga

SEQ ID NO: 72 - protein, 993 aa, Oryza sativa
MADTGSLEKMGRELKCPICLSLLSSAVSISCNHVFCNDCLTESMKSTSSCPVCKVPFRRREMRPAPHMDNLVSIFKSMEAAAGTNVVSTQEAPVVKLADGSDCVNSGKNSKRSQKSLTRKRKVTSEMEKNTAKDATASASQPTTKPSFSTNKRIQVKPFPESETPIRAEKIMKPEEPKNNLNNDVEGKNKAVASGQPGSPSLSPFFWLREQEEQEGCTAETLSETQSLDTPLRHNAPSFSDIKDSDDEIPLNTTPNSKAAATELFDSEIFEWTQRPCSPELYSTPLKKQSKAKSKLDQIEEKGDEEDVHIGGSFDKLGNASNAAQLVNTKATKQKRKKTSPSNKNSAKLSNRAEPCIKKSDANQQGSNRRKSAALKSCQKSSSAVGRNTSGRRNKASSNSKPIHGSSDNSPESYLPKEGLDVEAPDKPLSERIQNLEKTSRRKGSARKLEMAGKTISDTTEKNSEPRSKRVRRMSDHAIAKPVEVPSGSGNETEIPQLHTLTKGSIQRKSSNARRHSKVCGEQEGKNKLENTTMTPIILHGKCQNKEAVCTAPSVRTASVKYKQAKFSEQPDCFGTENFGNLQACPARNVLLKKCEVSTLKVSCAFCQTDVITEESGEMVHYQNGKQVPAEFNGGANVVHSHKNCLEWAPDVYFEDDSAFNLTTELARSRRIKCACCGIKGAALGCFEMSCRRSFHFTCAKLIPECRWDNENFVMLCPLHRSTKLPNENSEQQKQPKRKTTLKGITGFSRSSQIGSNQDCGNNWKWPSGSPQKWVLCCSSLSSSEKELVSEFAKLAGVPISATWSPNVTHVIASTDLSGACKRTLKFLMAILNGRWIVSIDWVKTCMECMEPIDEHKFEVATDVHGITDGPRLGRCRVIDRQPKLFDSMRFYLHGDYTKSYRGYLQDLVVAAGGIVLQRKPVSRDQQKLLDDSSDLLIVYSFENQDRAKSKAETKAADRRQADAQALACASGGRVVSSAWVIDSIAACNLQPL

SEQ ID NO: 73 - DNA, 747 bp, Oryza sativa
atgcctcccctggctccccggaagaggaaggcgttggcggcggcaagggggaggaagaagaaggagcgagtggcgccggaccgcatcagcgccctgccggacgaggtgctccacctcgtgctgtcgctgctcccggtgcacgacgcggtggcgacgtgcgtgctcgcccggcgctggctccacctctggaaggaagcaccgggcctctctgtggagtggtgggattacgatgaaccgggcgacaggttcatcagcttggtggaccgcttttttacgctccgcagcagcagcgcgcctctgaattactgcagtatcaacatcaatttcccggagttcttgcctgaaaaagagcagctcttcgtccgctggatccagcgagctttgcgctgccaagctcgggtgctacgaatcagtttgatcgattgggtcgagctgcctaacatgactctcatctctcagcacctcacgaggttagagcttcaagtttcgttggagctaagttactgccctggtagggctccgttccttgaaagcatgccatccttgctacaagcaattgttagattcgatgaagcttgtgaggacaaatgtcagaagagtgtctctggtggttgtgatgatgatgatgatgattattgttttggttgtgctgatgaggttgttgctggttacggcaccaatggcatgtgtcttcaaggcttgtcggaagctacgcacttggagttatcagctgatcctgcagtgtaa

SEQ ID NO: 74 - protein, 248 aa, Oryza sativa
MPPLAPRKRKALAAARGRKKKERVAPDRISALPDEVLHLVLSLLPVHDAVATCVLARRWLHLWKEAPGLSVEWWDYDEPGDRFISLVDRFFTLRSSSAPLNYCSININFPEFLPEKEQLFVRWIQRALRCQARVLRISLIDWVELPNMTLISQHLTRLELQVSLELSYCPGRAPFLESMPSLLQAIVRFDEACEDKCQKSVSGGCDDDDDDYCFGCADEVVAGYGTNGMCLQGLSEATHLELSADPAV

SEQ ID NO: 75 - DNA, 321 bp, Oryza sativa
atggcgctgacgaacggccggtacaagagctgcctgcaccgggcggtggtgcaccgggagcaggagcggcggtcgctggccttcttcctctgcccgcgcgaggaccgcgtggtgcggccgcccgccggcgccggcgccggcaagcggcggctctacccggacttcacctgggccgacttcatgcgcttcacgcagcgccactaccgcgccgacacccgcacgctcgacgccttcgcccgctggctccgcccgccggcctgctccggcgccgcgccggtcgtcggcccaccgacgacggcgacccaggcggccaccgtctag

SEQ ID NO: 76 - protein, 106 aa, Oryza sativa
MALTNGRYKSCLHRAVVHREQERRSLAFFLCPREDRVVRPPAGAGAGKRRLYPDFTWADFMRFTQRHYRADTRTLDAFARWLRPPACSGAAPVVGPPTTATQAATV

SEQ ID NO: 77 - DNA, 3420 bp, Oryza sativa
atggtttgccacgtcttctcgtccttctcctcctccctaattcgtgtgctggaggcgccgctgctccttccagctgcttcggcttcttcttcttcttcttcttctccggcgagccggagcggtggccgccgccgccgtgcagcccacgtccgcccttcgccggcgatctatcccggccgccaagaacttgcctctcactcatccatgctacccaccgacttcgacatcaaggtgttgattgagcggcacgaagccctgacggacgacgtgcaggagatgctgcagcatcaacgccggcgacaccagaagacggcgagcggcggccgggagcggatagccaccgtcgaccacctcaggcgcctctgcatggaccactacttccaagacgaggtcgacgacgccatggacgcctgcctgctcgaggagctcgcccatggcggcgacctgcttgacgccaccctcgccttccgcctcatgagagaagctggccaccatgtctcagcagatgaggttcttggaagattcacagatgataatggcgaattcaggctcgattacagaaaggacatcagagggttactcagcctgcaagacatatcacacatgaacattggacaagaagcctcactctgcaaggcaaaggagttctcaaccaggaaccttgaatctgccatcaactacctcgagccaaatcttgcaagatatgtgaggcagtcgctggatcatccctaccatgtcagcctgaatcagtacaaggccaggcaccatctcagctacctccagaccttgcctatccggtgcactgccatggaggagctcgcacttgcagacttccagctcaacaagctactccatcagatggagatgcaggagatcaaaagatggtggatggacctgggattggctcaagaaataccagttgccagggaccaggttcagaaatggtttgtgtggatgatgacagccatccagggtgcctccttgtcaagatgcagaattgaactcacaaagatcgtctcctttgtctatattgtggatgatatttttgatctggttggcacacgtgaggagctctcctgcttcactcaggcaatcagaatgtgggaccttgcagctgctgattccttacctagctgcatgagatcatgcttcagggctctacacacagttacaaatgacatcgcagatatggtcgagagagaacatggagtaaaccctatcaatcatctgaagaaagcttgggcaatgctgtttgatggattcatgacagagacaaaatggttgtctgctggccaggttcctgactcagaggaatacctaagaaatggagttgtcacctcaggagtgccacttgtatttgtacacctgctgttcatgctagggcatgatgtgagccaaaatgcagcagagtttgttgatcacatccctcctgtcatctcctgcccagcaaaaatcttgagactctgggatgacctgggcagtgccaaggatgaggcacaagaaggattggacggatcgtacaaggagctatacctcaaggagaacccggggctcgccgctggcgaggcggaggagcacgtgcggcggctgatcgcgggcgagtgggaggagctcaaccgggagtgcttctccgctagccccagtagatcgtcgccggcgacgaccttccccgccggcttcacgcaggcggcgctcaacgccgccaggatggtcggcgtcatgtatggctacgacggcgagcggcggctccccgtcctcgacgactacgaatggagaagtatcacagcaactcccgatttgctcccttcagagatgctccatttgctctccgtgttcatttcacacaaccaggaattcctcacatttgttgccaccatactttcaggtgcccttggtagctcaggctcatctttcagcagcatcgacagcctcagacgctcctcaacccttgagcaagctagggggctcttccgcttcttgcccgacacctacgccttcgcgccggacgccatctcgtacaactcgctgctctccgctctctgccgcgccggcgacgtgctcaccgcgcgcaagctgttcgacggaatgcgcgtcggaggagaagaaggcagaggagctgtctttcctaacgttatcacatacacgaccatgatcaaggcgtactgcgccaagaggctcgtgaacgaggctctcgcgatcttcaagctaatggttgcggatggtgtggcgccgaacaggatcacatacaacacgatggtgcaggggttctgcgatgccggcaggatggagctagtgaaggaggtgttggagatggactcgtttaggccggacacttgcacattcaacactctggtggccgtgcattgtagggaaggccggatcgaggatgctatgaaggtgtttaatcagatggtggagctccgtgtgagacgtgattctgcaagctatagcatggtcatccgggtgttgtgtgagaatggggaatttgggcaggctgaggagcttgtggatgagctcttggagaaggaggtgctcaagaagagagggggttgcacgccgctcattgcagcgtacaacccggtttttgtgtacttgtgtgagcatgggaagacaaagaaggcaaggatgctgtttgggcagctgctggaccggaggagcaaggtcgatgttcctgcattcaagacattgatccttgggcattgcagagagggtgatttcgaagaagggtatgcattgctgctctcaatgttgaagcgggatcttgtccctgatgatgaatgctacattgccgtgattgaagggttttcacagaggggaaggatgaagtttgcatgggaagccttgcacaggatgttgaatagcggtcttcggccaagcacaagtacttttcactcggttcttttggggcttttgaacaaagatggttgtgcaaaagaagcagctgatttgattgagataatgctagagaggaagattcgccaaaatgttgatctttcgacaaatttggtagatacattgttcaggaacaacctaaatgaccgtgcttacaagattgttacatctctatatgaccatggctattacatcaagatggaaaagttaatcgcaaacctttgcgaggaaaagaagttcatagaagctgcagattttactttgtttagcttggagaagtctcagaattttggtgtagccattccaagcatggttctggatggtctttgcatgactggtagagcttcagaagcattccggctgttctatgaactcattgagaacagaagtgctttggcttctgtcgctgcacctcgtagtttagttgcacttcatcatgcactggaggaatccgggaaaatgaaggaagctgattttattgctagacagatgagacgtgcaagtgccagaataagggaaagaatctag

SEQ ID NO: 78 - protein, 1139 aa, Oryza sativa
MVCHVFSSFSSSLIRVLEAPLLLPAASASSSSSSSPASRSGGRRRRAAHVRPSPAIYPGRQELASHSSMLPTDFDIKVLIERHEALTDDVQEMLQHQRRRHQKTASGGRERIATVDHLRRLCMDHYFQDEVDDAMDACLLEELAHGGDLLDATLAFRLMREAGHHVSADEVLGRFTDDNGEFRLDYRKDIRGLLSLQDISHMNIGQEASLCKAKEFSTRNLESAINYLEPNLARYVRQSLDHPYHVSLNQYKARHHLSYLQTLPIRCTAMEELALADFQLNKLLHQMEMQEIKRWWMDLGLAQEIPVARDQVQKWFVWMMTAIQGASLSRCRIELTKIVSFVYIVDDIFDLVGTREELSCFTQAIRMWDLAAADSLPSCMRSCFRALHTVTNDIADMVEREHGVNPINHLKKAWAMLFDGFMTETKWLSAGQVPDSEEYLRNGVVTSGVPLVFVHLLFMLGHDVSQNAAEFVDHIPPVISCPAKILRLWDDLGSAKDEAQEGLDGSYKELYLKENPGLAAGEAEEHVRRLIAGEWEELNRECFSASPSRSSPATTFPAGFTQAALNAARMVGVMYGYDGERRLPVLDDYEWRSITATPDLLPSEMLHLLSVFISHNQEFLTFVATILSGALGSSGSSFSSIDSLRRSSTLEQARGLFRFLPDTYAFAPDAISYNSLLSALCRAGDVLTARKLFDGMRVGGEEGRGAVFPNVITYTTMIKAYCAKRLVNEALAIFKLMVADGVAPNRITYNTMVQGFCDAGRMELVKEVLEMDSFRPDTCTFNTLVAVHCREGRIEDAMKVFNQMVELRVRRDSASYSMVIRVLCENGEFGQAEELVDELLEKEVLKKRGGCTPLIAAYNPVFVYLCEHGKTKKARMLFGQLLDRRSKVDVPAFKTLILGHCREGDFEEGYALLLSMLKRDLVPDDECYIAVIEGFSQRGRMKFAWEALHRMLNSGLRPSTSTFHSVLLGLLNKDGCAKEAADLIEIMLERKIRQNVDLSTNLVDTLFRNNLNDRAYKIVTSLYDHGYYIKMEKLIANLCEEKKFIEAADFTLFSLEKSQNFGVAIPSMVLDGLCMTGRASEAFRLFYELIENRSALASVAAPRSLVALHHALEESGKMKEADFIARQMRRASARIRERI

SEQ ID NO: 79 - DNA, 1118 bp, Oryza sativa
  misc_feature (338)..(338): r = adenine or guanine
atgagcatggtggtgcagcaggagcaggaggtggtgttcgacgcggcggtgctgagcgggcagacggagatcccgtcgcagttcatatggccggcggaggagagccccgggtcggtggcggtggaggagctggaggtggcgctgatcgacgtgggggccggggccgagaggtcgtcggtggtccggcaggtgggggagcgtgcgagaggcacggcttcttcctggtggttaaccacggcatcgaggcggcgctgctggaggaggcgcaccggtgcatggacgccttcttcacgctgccgctgggggagaagcagcgggcgcagcggcgcgcgggggaragctgcggctacgccagcagcttcacggggcgcttcgcgtccaagctgccgtggaaggagacgctgtcgttccggtactcatcggctggagatgaagagggcgaggagggcgtgggtgagtacctggtgcggaagctcggggcggagcacgggcggcggctgggcgaggtgtactcgcgctactgccacgagatgagccgcctgtcgctggagctgatggaggtgctcggggagagcctgggcatcgtcggagaccggcgccactacttccggcgattcttccagcgcaacgactccatcatgcgcctcaactactacccggcgtgccagaggccactcgacacgctgggcaccggtccgcactgcgaccccacctcgctcaccatcctccaccaggaccacgtcggcggcctggaggtgtgggcggaggggcggtggcgcgccatccgccctcgccccggggcgctcgtcgtcaacgtcggcgacaccttcatggcgctctccaacgccaggtaccgcagctgcctgcaccgggcggtcgtcaacagcacggcgcctcgccgctcgctggccttcttcctctgcccggagatggacacggtggtgcgcccgccggaggagctggtcgacgaccaccacccgagggtgtacccggacttcacgtggcgtgcgctgctggacttcacgcagcgccactacagggccgacatgcgcacgcttcaggccttctccgactggcttaatcatcatcgtcacctgcaaccaacaatatactcctag

SEQ ID NO: 80 - protein, 371 aa, Oryza sativa
MSMVVQQEQEVVFDAAVLSGQTEIPSQFIWPAEESPGSVAVEELEVALIDVGAGAERSSVVRQVGECERHGFFLVVNHGIEAALLEEAHRCMDAFFTLPLGEKQRAQRRAGESCGYASSFTGRFASKLPWKETLSFRYSSAGDEEGEEGVGEYLVRKLGAEHGRRLGEVYSRYCHEMSRLSLELMEVLGESLGIVGDRRHYFRRFFQRNDSIMRLNYYPACQRPLDTLGTGPHCDPTSLTILHQDHVGGLEVWAEGRWRAIRPRPGALVVNVGDTFMALSNARYRSCLHRAVVNSTAPRRSLAFFLCPEMDTVVRPPEELVDDHHPRVYPDFTWRALLDFTQRHYRADMRTLQAFSDWLNHHRHLQPTIYS

SEQ ID NO: 81 - DNA, 567 bp, Oryza sativa
atgatggttgatggtgggaccgcggtgaatttgatgccttatgctacgttcaggaagctgggtagaaatgccgaggatctcatcaagaaaaatatggtgctcaaggactttggtggcaatccatcggaaaccaaaggtgttctaaatgtggagctgacagtcggcagtaagactattcctaccacgttttttgtcatcgataggaagggttcttacagcttgttgcttggaagggattggattcacgccaattgttgtattccttcaactatgcatcaatgcttgactcagtggcaaggcgacaaaatagagatcgtaccagccgacaggcagttgaagatggagaacccaagctattattttgagggcgtcgtggagggtttaagtatctacactaaggatacgcctccaaggagatgcaaagccgatatgcttgaacctgtcaaagctgagattaagcgtttatatgatgctagttttattcgtccttgccgatatgctgagtgggtttctagcatagttcctgtcatcaagaagaacggcaaggtgaggggaacagaattttga

SEQ ID NO: 82 - protein, 188 aa, Oryza sativa
MMVDGGTAVNLMPYATFRKLGRNAEDLIKKNMVLKDFGGNPSETKGVLNVELTVGSKTIPTTFFVIDRKGSYSLLLGRDWIHANCCIPSTMHQCLTQWQGDKIEIVPADRQLKMENPSYYFEGVVEGLSIYTKDTPPRRCKADMLEPVKAEIKRLYDASFIRPCRYAEWVSSIVPVIKKNGKVRGTEF

SEQ ID NO: 83 - DNA, 723 bp, Oryza sativa
atggcgactgcgaccgaggaggttgccgctgcggctgctgccgccggcgaggcgccgccgccgccgccgccagcggtggtagaggaggcgaaggaggctttggaggcaccgaagccggaggaggcgccgaaggctgaggagggggaggagaagaaggcggagggtgagaaggagaaggagaaggcgaagaaggagaggaaaccgagggcgaggaagccccgatcggcggggccacaccacccgccctacttcgagatgatcaaggaggcgatcatggcgctggacgggaacggcaaggcgggatcgagcccgtacgcgatcgccaagtacatgggggagcagcacatgggggttctcccggcgaactaccggaaggtgctcgccgtgcagctgcggaacttcgccgccaagggccggctcgtgaaggtgaaggcctcgttcaagctgtcggctgccgaggagaagaaggcgacggcggcgaaggcggccaggtccaaggcggccaagggcgtcgtcggcggcgccaagaggaagaggaccccgcgcccctccgccgccgccgccaagaagcccgcgtcgtcggcggaggcgaagaaggcggttccccccgcccgcccagcccgcgccaagagggcgaggaaggccgcccccgcgaagccgatgcagccgcccaaatccatccgctccgccatctccaagaaggccaacaaggccagcgcctga

SEQ ID NO: 84 - protein, 240 aa, Oryza sativa
MATATEEVAAAAAAAGEAPPPPPPAVVEEAKEALEAPKPEEAPKAEEGEEKKAEGEKEKEKAKKERKPRARKPRSAGPHHPPYFEMIKEAIMALDGNGKAGSSPYAIAKYMGEQHMGVLPANYRKVLAVQLRNFAAKGRLVKVKASFKLSAAEEKKATAAKAARSKAAKGVVGGAKRKRTPRPSAAAAKKPASSAEAKKAVPPARPARAKRARKAAPAKPMQPPKSIRSAISKKANKASA

SEQ ID NO: 85 - DNA, 5718 bp, Oryza sativa
atggaagttgaacaggctgcagaagtaggagaggtgactgctcctaagttgcctgataaggcagtcgacaaggctcaggtacatgatgatgacaaggaaaatctagtgaatggtaattcaaatctgcaagtgaaggaagcacacaacgatgaggatgatggcacaggatcagacggttttgagctgatagatgtgaaggagaattttgattctgcaaaagtggtggaagaagaaaaggctagtcccatagagcaaggaaaaactgcagcgcttgaagaacaagcgctcacgagagaatctgccatgctaaaccaagaagcaaaacaactggaagaactaacgaggcgtattgaagagcttgaattggaaaaggagaaattggtaaagggcgtgacagaagcagaaaacaagcagaacctgcattacacttctctacaagaagcacagagatctttagctgataaagataaggagctggctgatgcaactcagtcactgaaggagctgggttctgagcttgagagctcaaaggagaggattcaagaaattgaagctgaattagctgcgtccgctgacaagctccacaaacttgaagagctcaaggatgaaagaagcttgcatgctgcgcaggaggcgaagagggcctcagaacttgacaagacgcttgaaacggcacagttgaacatgaaagagatggaagctcagatcagttctcttcaagaagagataaaggggcatcaagataaggccattgatcatcagcaagtggaagaatcactgagaagcacgctctcagaactcaagatggtacaagaggcactggagttgtcaaaatcacaagtggacgatttggagcagaagcttgcctctcaggatgctaacatcagtcatctcactgaagagttgagtctccatcgttcatctgaagaatcgctgaaggaaaaaactcttaaattagagaatgaactttcttctgcgcatgaagagctgcaagcaaagatcctgaatttgcaggaaatggagatcaagctcgaagagcaggcaaaggaaaaacagacttgggaagctacattggagaagcaacaggagcagatactcaacctgcagactgagctcgatgaatcaaagggcggaaatgaaactctccgagggactatagctgatcttaactcaaaacttgcagagagagactctcttctgcgtcaagctgaagatgagcatgctaaagcacagctgctcctctcagaagccctgtcacataaagatgaactggaggtaaatctgaaatctatcaatgagcagcatggtgagtccagagctgctgcagaaaatgcaagccagaagattctagagcttgaagcactactccagacacttcatgctactgaagaggctttgaagttacagctagaagaggctgaggcaagggtggaagttgctgagaagaaaggttcagatcttgagcaactgctcggtgaatctgagaacaaattagtcgcttccagtggagaactaaagcagcttcatcagcagaaaagggagaagctgcttgaagaagcaacgaacagtgtggaggcgtacaaagaaaagatcaatgagttgcaagcatctctggattccacgacgtctaaaaatcagctgcttgaacaagaagtcaaggacctgtctgacaagtttacagagcatcaagaacaagctcattcggttcacgaaagaagtcttgaactggagagcctgcttcatacatcgaagtctgatgctgaagttgcacacacccggacacaggatcttgaaaatgagctgaacactgcaaatgaaaagttcaaggaggttgaagcagacctagaacagtacaggagcaaggtttctcagctttccgatgaactagaagcataccagacaaaagcagctagtcttgaagctgtgatggaatctgcaagcgaaaaggagaaagagcttgtggaatctctgggtcaaattactgaagaaaagaagaaacttgaactactagtattggagtatgaagagaagaccgaagaatacttaaaggaaaaacaatctttggaagagaggttgcagagccaagaatccaaggtgctggctttagaggaatcgttggtgaaaatgggagaagaaaaagaaagtcatgagggcaccattgctgatcttaatctacaattatccaataagaatgacatgtacatgcaattggagtcccagttaagtcaggccggggatgatcatagcaaaacaagatcacttctatctgaagcacaattgcacaaagaggaactggagttaaacttgaaatctcttaatgatctgcacgtcgaatccaaaacagctgcggagtctgcattacagagaattgcagagcttgaaactcaggttcaggaattaagtgctgctgaacaaagtttgaagtcacaccttactgagtttgagtcaaagttggcatctgctgagaaaaagagtatggatcttgagcaagagcttaaagatgctacagaggaatgcaacagttcccgtttgagagtcgatgagctttctggggagcttgaagagagcagcttgagcacaaagggaaaggcactagaacatgccacttccaagaaaattgatctggaagcgctgtaccagtccttacttgaagacacagagatgaagcttcagcaagcaggggagaacttgacccagaaggagacagaatgccaggagttgtctgaaaaattgaaggcagctgaggaacaagcagcatcttatcaagcaaaagcaactgcagccgcagaagaggtggaatccgtgaaggtggagcttgaagcctttgagacggagatatctactcttgagaccaccattgaagaacttaagaccaaggcctccaatgccgagtcaagggccgaacaggctttggttgagagtgcaatgatgagtgagacaaaccaggccctaaaagaggaccttgatgctaagctggccatgcttcgtgaactacaggaacagtttgattctactcatgctgagaaagaagaagttttcacgaagctatctgcgcatgagaaaacgatagagcatttgactgaggtgcacagtagaggcttagaactccacgctacagctgaatcaaagaatgcagaacttgaagcgcaaatgcatgaagctcttgagacaatagggaagaaagattcagaagtaaaagacttgaatgagaggctggctgctcttgagtccgagattgaaagtttgacgcatgtgaatgaagccatgaaacaggaaatcaatgctaagctggtcaaggttgatgagctgcaggagaaattgagttccataagttctgagaaagaagaagttgcagagaaagtggttgttcatgagaaaacaatagaacatttgagagaagagcactcaaggggcttggagctccagtctgctgctgaatcgagatctgcagaaattgagaatgaactgcgtgaagttcttgaaacagtagctcagaaagaagctgaagttacagacttgaaggaaaagctagtttcacttgaaactgagaatgaaaaactggttggtataaatgaggccctgaaaggggaactggatactaaggtggcaatgttcgatgagttacaggaacagttcagctcaactcatgctgaaaaggaagaagctgcagagaagctagctgttcatgagagaacaatttcgcacctgacagaagtgcacacgagaagcttggaactccactctgcagctgagtcaaagaacgaagaaattgaaagtaagctccatgaggcccttgagatggcagcacagaaagaagctgaagttaaagacctaagcaagaagctggatgctcttgaaatagagttgggatattatgaggagcaggcaactgaagctgctgctgctgaagaaacgcataagattaagtttgatgaagctgtgcacaaaataaaaagcctagaagaacaacttgcagtaacagaaaacaaggttgagcttttccataccgagaaagaaaatttggttattgcaaatagcaaattgaatgaggagctggagttacatcagaacaagctgaatgaattgcaagtagcccttgctgcagcagtagcagaaaaggaggggtcatctgaagagattcattcattgaggaaaacactagatggcatgattcaacggaaggaagagctggaaagccaggtatcttctactgtcgaagagcatgaagaactgaagagcaagtacaatattacgctggaggaaaagcagttgttgaatgagaagtatgaatctgcaaagaaagagcttggggaagcaatagctaaattagaggagcaaatgaatgttgacaagtcagaaaaagaattgcacatctcaaaattggagaggcagatcacattgtctgaactaaaatacatggaggagatccaaaccatgcaagtggaaacaactgaaaaggatgaggcgcttacaaccaaaatgcaagagcatgcaaacttggtccatgaaaaagatgcgttggaacaacaattactggaagttaggaaggaactaaatgatgcttaccataccatagcaaatcaggaagagcaagtttcagtgagggagataaagtgggatgcatataagaagttctcagaggatcaacttgaagctgagcagcagcatgttgcagagctggaagtacaagtatcatctcttaaacaacagctgcaagaaactgagatccattacaagcacaaggaagaacaggtttctctaagggaggttcaatgggaagcagatcaagaacattcagtgagtgagctaaaagctcagcgtcagtatgctgcagaattagagaaacaaattggagctcttacacagcagttacaattggttgaaaaacagtatgagcaaaaggttacagaagagagggagaaacttgctctcgttaacacggaagtcagcaagttgacacagaagcttagcaagagtgctgaaatggagaagaagatagaacaccttgagcagaaattgcaggcaaaagattctgtggaatcgacatcccgcgacttcagccttgactcatcaacgctgccaagcaaacaacgcgacagatcgctggctcctgaaacgacacctccaaacccaacacaacagcaagaactgcgagagccttctggtatcatggcctttaagttcatcctgggagtcgcgctgctgtccgtgctcatcgtgctaactttctttggtggtcatgtgatgcactactttgcagataagatcatgactcatgagaaaggggaacagtctccatggcaggtgggtgtttcggaaaatacgatgcacagtgttttcagccgtgaacggtgcatgtcggcgctgggtgtccggtctgaccgggtagcccgacggtcagaccgtgtgtttttctctgaatcacgacagtcacaccagcgacaaggcggcggtccaaccagcggtgacatggcggtcagacaggtggcatccacccggtcagaccgacgcacacacgccgtgaaaggtggtatacccttcgattgtacgggtcatgtagtgactttatcagtcttaatccagaaccggccgtcggagacagcgaggtcggccggcggcggatcgaggactgacgtgctaaatcgtcaaggctacaggaaggaagaaggagcaagctggcgagtgcgaggactccgttcattgcaaatcccaaaataa

SEQ ID NO: 86 - protein, 1905 aa, Oryza sativa
MEVEQAAEVGEVTAPKLPDKAVDKAQVHDDDKENLVNGNSNLQVKEAHNDEDDGTGSDGFELIDVKENFDSAKVVEEEKASPIEQGKTAALEEQALTRESAMLNQEAKQLEELTRRIEELELEKEKLVKGVTEAENKQNLHYTSLQEAQRSLADKDKELADATQSLKELGSELESSKERIQEIEAELAASADKLHKLEELKDERSLHAAQEAKRASELDKTLETAQLNMKEMEAQISSLQEEIKGHQDKAIDHQQVEESLRSTLSELKMVQEALELSKSQVDDLEQKLASQDANISHLTEELSLHRSSEESLKEKTLKLENELSSAHEELQAKILNLQEMEIKLEEQAKEKQTWEATLEKQQEQILNLQTELDESKGGNETLRGTIADLNSKLAERDSLLRQAEDEHAKAQLLLSEALSHKDELEVNLKSINEQHGESRAAAENASQKILELEALLQTLHATEEALKLQLEEAEARVEVAEKKGSDLEQLLGESENKLVASSGELKQLHQQKREKLLEEATNSVEAYKEKINELQASLDSTTSKNQLLEQEVKDLSDKFTEHQEQAHSVHERSLELESLLHTSKSDAEVAHTRTQDLENELNTANEKFKEVEADLEQYRSKVSQLSDELEAYQTKAASLEAVMESASEKEKELVESLGQITEEKKKLELLVLEYEEKTEEYLKEKQSLEERLQSQESKVLALEESLVKMGEEKESHEGTIADLNLQLSNKNDMYMQLESQLSQAGDDHSKTRSLLSEAQLHKEELELNLKSLNDLHVESKTAAESALQRIAELETQVQELSAAEQSLKSHLTEFESKLASAEKKSMDLEQELKDATEECNSSRLRVDELSGELEESSLSTKGKALEHATSKKIDLEALYQSLLEDTEMKLQQAGENLTQKETECQELSEKLKAAEEQAASYQAKATAAAEEVESVKVELEAFETEISTLETTIEELKTKASNAESRAEQALVESAMMSETNQALKEDLDAKLAMLRELQEQFDSTHAEKEEVFTKLSAHEKTIEHLTEVHSRGLELHATAESKNAELEAQMHEALETIGKKDSEVKDLNERLAALESEIESLTHVNEAMKQEINAKLVKVDELQEKLSSISSEKEEVAEKVVVHEKTIEHLREEHSRGLELQSAAESRSAEIENELREVLETVAQKEAEVTDLKEKLVSLETENEKLVGINEALKGELDTKVAMFDELQEQFSSTHAEKEEAAEKLAVHERTISHLTEVHTRSLELHSAAESKNEEIESKLHEALEMAAQKEAEVKDLSKKLDALEIELGYYEEQATEAAAAEETHKIKFDEAVHKIKSLEEQLAVTENKVELFHTEKENLVIANSKLNEELELHQNKLNELQVALAAAVAEKEGSSEEIHSLRKTLDGMIQRKEELESQVSSTVEEHEELKSKYNITLEEKQLLNEKYESAKKELGEAIAKLEEQMNVDKSEKELHISKLERQITLSELKYMEEIQTMQVETTEKDEALTTKMQEHANLVHEKDALEQQLLEVRKELNDAYHTIANQEEQVSVREIKWDAYKKFSEDQLEAEQQHVAELEVQVSSLKQQLQETEIHYKHKEEQVSLREVQWEADQEHSVSELKAQRQYAAELEKQIGALTQQLQLVEKQYEQKVTEEREKLALVNTEVSKLTQKLSKSAEMEKKIEHLEQKLQAKDSVESTSRDFSLDSSTLPSKQRDRSLAPETTPPNPTQQQELREPSGIMAFKFILGVALLSVLIVLTFFGGHVMHYFADKIMTHEKGEQSPWQVGVSENTMHSVFSRERCMSALGVRSDRVARRSDRVFFSESRQSHQRQGGGPTSGDMAVRQVASTRSDRRTHAVKGGIPFDCTGHVVTLSVLIQNRPSETARSAGGGSRTDVLNRQGYRKEEGASWRVRGLRSLQIPK

SEQ ID NO: 87 - DNA, 1554 bp, Oryza sativa
  misc_feature (429)..(429): y = cytosine or thymine
atggagaccccgactctgaccacgctgctcaaggcggcggtggccacgttcccctcgcgccgcgccctcgccgtcccgggcaaggtcgacctgtcgcacgcggcgctcgacgcgctcgtcgacgccgcggccgcgcgcctcgccgccgatgcgggcgtgctccccggccacgtcgtcgcgctcgccttccccaacaccgtcgagctggtgatcatgttcttggcggtgatccgagcgcgcgcggtggcggcgccgctgaacccggcgtacacgcaggaggagttcgagttctacctctccgactccggggcgcgtctcctcatcaccaaccccgagggcaacgtcgccgcgcaggcggccgcctccaagctgggcctcgcccacacaccgccagcctcaaggacgccgccggccaagtcactcgcgttyccgcttcgctccgccgccgccgcggccaaggacttcgcaacgacccgtccgacgtggcgctgttcctgcacactcggcaccacgagccggcccaagggcttcgtaagcagctcacgcagcgtcggactgcggcgtacgtcagaacatcgcgccgtgtaccgcctcaccgaggcggacgcgacggtgatcgtgctcccgctcttccacgtccacggcctcctctgcggcctcctcgcctccctggcgtccggcgcgtccgtgacgctcccggcggcggggcgcttctcggcgtccaccttctgggccgacatgcgcggcgccggcgcgacgtggtacacggcggtgccgacgatccaccagatcatcatcgaccggcacacctcgaagccggaggcggagtacccggcgctgcggttcatccgcagctgcagcgcgtcgctggcgccggcgatcatggagaagctggaggcggcgttcggggcgccggtggtggaggcgtacgcgatgacggaggcgtcgcacctgatgacgtcgaacccgctgccggaggacggggcgaggaaggccgggtcggtggggcgcgcggtgggtcaggagatggcgatcctggacgaggaagggcggcgggtggaggccgggaagagcggcgaggtgtgcgtgcgcggcgccaacgtgacgagcgggtacaaggggaacccggaggcgaacgaggcggcgttccggttcgggtggttccacaccggcgacatcggcgtcgtggacgaggaggggtacctgcggctggtggggcggatcaaggagctgatcaaccgcggcggcgagaagatatcgccgatcgaggtggactcggtgctgctcgggcacccggccatcgcgcaggccgtggcgttcggggtgcccgacgccaagtacggggaggagatcaactgcgcggtgatcccccgggagggcgtgtcgctcggggaagaggaggtgctggcctactgccggaggaacctggccgcgttcaaggtgcccaagaaggtgtacatcgccgacgagcttcccaagacggccaccggcaagatccagcgccgcatcgtcgcgcagcacttcgtcgtgccggtgctgcccaccaaggcgtaa

SEQ ID NO: 88 - protein, 517 aa, Oryza sativa
METPTLTTLLKAAVATFPSRRALAVPGKVDLSHAALDALVDAAAARLAADAGVLPGHVVALAFPNTVELVIMFLAVIRARAVAAPLNPAYTQEEFEFYLSDSGARLLITNPEGNVAAQAAASKLGLAHTPPASRTPPAKSLAFPLRSAAAAAKDFATTRPTWRCSCTLGTTSRPKGFVSSSRSVGLRRTSEHRAVYRLTEADATVIVLPLFHVHGLLCGLLASLASGASVTLPAAGRFSASTFWADMRGAGATWYTAVPTIHQIIIDRHTSKPEAEYPALRFIRSCSASLAPAIMEKLEAAFGAPVVEAYAMTEASHLMTSNPLPEDGARKAGSVGRAVGQEMAILDEEGRRVEAGKSGEVCVRGANVTSGYKGNPEANEAAFRFGWFHTGDIGVVDEEGYLRLVGRIKELINRGGEKISPIEVDSVLLGHPAIAQAVAFGVPDAKYGEEINCAVIPREGVSLGEEEVLAYCRRNLAAFKVPKKVYIADELPKTATGKIQRRIVAQHFVVPVLPTKA

SEQ ID NO: 89 - DNA, 573 bp, Oryza sativa
atggccgcgctgccattagccaccgccgaagtgtgcgacgcaaactcaaatccaatcatcgccggcgagctccgcgcctccctcccatcttcaaaatctacgggaggcggcaggttttcgccggcccagtcgcgacggtgaaggtgttcgaggacaacgtgctgggtccgcgagctcctccaggagaagggacatggccgggtgctcgtcgtcgacggcggtggtagcgtgcgctgcgccctcttgggcggcaacctcgcgcagctggcgcagatcaatggatgggtcggcatcgtcgtcaatggctgcatcagggatgtggatgagatcaatggctgtgacgttggtgtccgtgctctcaattcgcaccctatgaagtcggggaagaagggcgccggtgagaagcgtgtgcctgtgaccattgaagggaccaggatttgcgacggcgagtggctctacgctgatgctgatggcattctcatctcgaggactgaattgactgtgtgaagttcctgaatgtgtcgatctgtacgtacgagtagttggtgcataaaaggggtgatgattaattga

SEQ ID NO: 90 - protein, 168 aa, Oryza sativa
  X_region (47)..(47): Xaa = any naturally occuring amino acid
MAALPLATAEVCDANSNPIIAGELRASLPSSKSTGGGRFSPAQSRRXRCSRTTCWVRELLQEKGHGRVLVVDGGGSVRCALLGGNLAQLAQINGWVGIVVNGCIRDVDEINGCDVGVRALNSHPMKSGKKGAGEKRVPVTIEGTRICDGEWLYADADGILISRTELTV

SEQ ID NO: 91 - DNA, 713 bp, Oryza sativa
atggcgagcccgcagtgctgcgcgaacccaccgacgctgaacccggccggcggggaggggaaggtggtggagagcttcggcgggatcaaggcgtacgtcgccggcgccgcggagtccaaggccgccgtcgtcctcatctccgatgtcttcgaggaagatagccgacaaagttgcctcgtctggatactttgttgtggtgccagatttcttacatggggatcctttagtacctgaaagtactgagaaaccgtttcaaatgtggataaaagaacatggcccgaaagcatttgaagaggcgaaaccaattattgccgctctgaaggagaaaggagtgtctagtattggggctgtaggttattgctggggtggcaaaggtggtggtagagttagtgaaagctcatgagatccaggctgctgtgatgtgtcacccctcttttgtgactgttgatgatatgaaaggtctagatttcagaggtcaaatgcccaattgctatacttggagctgaaattgatcgtatgtccccaccagaagtggtgaagcagttcgagcaggttctttcttcaaagtcagggttggccactttgtcaagatcttccctggggttgaacatggatggactgtgagatacaagaatgatgatgcagctgctgtcaagagcgccgaggaagccctggcggacatgattgactggtttaataagaacctgaagtga

SEQ ID NO: 92 - protein, 236 aa, Oryza sativa
  X_region (224)..(224): Xaa = any naturally occuring amino acid
TRPAGRGRWWRASAGSRRTSPAPRSPRPPSSSSPMSSRKIADKVASSGYFVVVPDFLHGDPLVPESTEKPFQMWIKEHGPKAFEEAKPIIAALKEKGVSSIGAVGYCWGGKVVVELVKAHEIQAAVMCHPSFVTVDDMKGLDFREVKCPIAILGAEIDRMSPPEVVKQFEQVLSSKSGLHFVKIFPGVEHGWTVRYKNDDAAAVKSAEEALADMIDWFNKNLKXADMIDWFNKNLK

SEQ ID NO: 93 - DNA, 732 bp, Oryza sativa
atggcgacctcgccggagattggatggtcggctgcgactttggaggacatctccgattttttgggggtaaagatagaggaggataagaggaatatttcgcctcaactaattttagaaaaacacaaggggaaagggaacactgggttgctcactgttgttgatgataccgcaatagagcagcaaactaaggaggtcttgacagcaatgtgcgtggctttcaactcgaaaacggtgatgaacagggctccagaaaaaatctcaatggagatcctagctatcagacagaacatggtgaccttggctgcaaatgaagagagggagtattgtcatagacaatgcagctcaggagatggagtcggacaaggtgggctagtggctgcgtatgctccaactttgctagtcgatgcaactcaggacttggtgtcctcgtcaattagcacaagagatgctgctccaatggtgaatcaggaggagacagaggtaaccacatcacaggactcgatgatctttgatgtcaggattgcaggtgtcaacacggtaattgagttggctgctgatggggcacaacttgatgccgcacataccatcattgctaaagcaaaggtgcaagtagaagcaggtgggaagcatccctctcaagaagttagacaacgctctcgtcaaccgattgatcctacaccaacacgtcaaagtgaactacagaagacaatgctaaacgagaaaactgattag

SEQ ID NO: 94 - protein, 243 aa, Oryza sativa
MATSPEIGWSAATLEDISDFLGVKIEEDKRNISPQLILEKHKGKGNTGLLTVVDDTAIEQQTKEVLTAMCVAFNSKTVMNRAPEKISMEILAIRQNMVTLAANEEREYCHRQCSSGDGVGQGGLVAAYAPTLLVDATQDLVSSSISTRDAAPMVNQEETEVTTSQDSMIFDVRIAGVNTVIELAADGAQLDAAHTIIAKAKVQVEAGGKHPSQEVRQRSRQPIDPTPTRQSELQKTMLNEKTD

SEQ ID NO: 95 - DNA, 1423 bp, Oryza sativa
atgcatctgagcgagaacgaggggatcgagggcgtgcggttcgcggtgacgggcggccagggcttcgtcggctccgcactgtgcctcgagctgctccgccgcggcgcccgggaggtccgctccctcgacctccgcgcctcctccccctggtccgaccagctgctcggcgccggcgtccgcttcttccaagggggatgttagaaagaaggaagatgtggggaaggctttgcgcggtgtggactgtgttttccatctcgcttcgtatggcatgtcagggaaggaaatggtacaggctgggcgagccgacgaggtcaatataaatggtacatgcaatgtgctggacgcttgccacgagcatggtgttagaaggctcgtgtatgtaagcacgtataatgtggtttttggaggagagccgattgtcaatgggaacgaggcgctgccttatttccctgttgaagaccatgttgatgcctatgcgcgtagcaaatcaattgctgaacagttggtgctgaagagtaatggccggcaaactaacgtctttatacatgctcaatacgtcccgccgctatctatggtccaggtgaagagcggcatcttccaaggatactatcccttgcgaagttgggattagcattcttcaagattggggatccaaatgtgaagtcagattgggtctatgtggataatcttgttcttgcactgatattggcaagcatgggacttttagatgatattcctgacaggaagggaattcctgtagctgctggtcaagcatatttcatatgtgatgggatcgcctgtcaatacttttgaatttctcagtcctctatttcaaagtttggattacacagttccacgagttagaatggatacctcagttgctcttgccatctcaagattttttgtgttcatgtatacactactctatccatggttggatagtaaatggattcctcagcctcttctccttcctgctgaagtatacaaggtgggtgttacacactacttttcatatttgaaagctagagaggaaatcggctatgtacctatggtgagcccgcgagaaggattggctgcaactatttcctactggcaggagaggaagagaaaagaactagatggcccaaccatatttccttggctgtttgtaacaattggcatgctggcattgttttctgctgcttaccttccacccgtcggtccattgaaatgggtgcttgacctccatttatttgttttccgatcaaagttggtgattcggttagtctttgtgatagcaactgcattgcacgttggtgaagctgtttatgcttggttcttggcaaagaagtatgacccgaggaatgctacaggttggttttggcaaacattcatgctcgggttcttttctcttcggtatctgcttaagagaatgagagagtag

SEQ ID NO: 96 - protein, 473 aa, Oryza sativa
MHLSENEGIEGVRFAVTGGQGFVGSALCLELLRRGAREVRSLDLRASSPWSDQLLGAGVRFFQGDVRKKEDVGKALRGVDCVFHLASYGMSGKEMVQAGRADEVNINGTCNVLDACHEHGVRRLVYVSTYNVVFGGEPIVNGNEALPYFPVEDHVDAYARSKSIAEQLVLKSNGRQTNVLYTCSIRPAAIYGPGEERHLPRILSLAKLGLAFFKIGDPNVKSDWVYVDNLVLALILASMGLLDDIPDRKGIPVAAGQAYFICDGSPVNTFEFLSPLFQSLDYTVPRVRMDTSVALAISRFFVFMYTLLYPWLDSKWIPQPLLLPAEVYKVGVTHYFSYLKAREEIGYVPMVSPREGLAATISYWQERKRKELDGPTIFPWLFVTIGMLALFSAAYLPPVGPLKWVLDLHLFVFRSKLVIRLVFVIATALHVGEAVYAWFLAKKYDPRNATGWFWQTFMLGFFSLRYLLKRMRE

SEQ ID NO: 97 - DNA, 792 bp, Oryza sativa
atgggcttgtctcatagcaagatccggtggatgaaaaaggcccgcggagccaggctgagcggaaacgctagaatcgaccttcgcttgcacccgcgcgtgcagaacccatggatggggtcaccaccatccctcctctcctcctcctcatttgttccaaaccagtggaaagctagggttccgccgactcgcgactggagggcgctgctcgtcgcgccgtcctcgccggcgggagggccggtcgtccgtcagcatcctctcttccgttggtcatcctccctctctttcgctcgccgccatcgctttcttccactggttcactctctccgtcaagccgtttggttcctgctgctacgcccctctctttcgtcgactctctccgttgagctctctggttatcctgtttacttttactatgtttcaggaaaatgtgataatggaaaaacttgtgagatcaagtgtagatatactaaggttgataagtttgaagcaatctgtacaaaagcttgcaagcagaacatggttgatgagtttgaagcaatctgtacaaaagcttgcaagcagaacatagctgaaacagatggtttagttttgtatgcggttactaatttgtttatcaaattggttacttgtaaaaaacttgccatgagcacgattggtgtgagtgagtggatgacaggcatggctcaaaatgtgtctttgaagggtgttaaaatgcccatagattctgctgattggaatgactacaacactagagttgtctgtgagatttttggctatcttgcagcaacttga

SEQ ID NO: 98 - protein, 263 aa, Oryza sativa
MGLSHSKIRWMKKARGARLSGNARIDLRLHPRVQNPWMGSPPSLLSSSSFVPNQWKARVPPTRDWRALLVAPSSPAGGPVVRQHPLFRWSSSLSFARRHRFLPLVHSLRQAVWFLLLRPSLSSTLSVELSGYPVYFYYVSGKCDNGKTCEIKCRYTKVDKFEAICTKACKQNMVDEFEAICTKACKQNIAETDGLVLYAVTNLFIKLVTCKKLAMSTIGVSEWMTGMAQNVSLKGVKMPIDSADWNDYNTRVVCEIFGYLAAT

SEQ ID NO: 99 - DNA, 2967 bp, Oryza sativa
  misc_feature (2466)..(2466): k = guanine or thymine
atggatgctgtgaatgttcttgcctcggcgacccagctggtgtccgcgatgctcaccgcggtcggcgcgctggagcaggcggctgccgacttcgccgaggctcccaggaggctccaggttcttgaggattttgtgtccgaccttgggctgttgatgcagcaatccaagcagaagcacgcgcacaagatgcacgcgccgcagctcgagcgtcagctccagagcctaggcaagctgatggaccagctccatgccaacatcacaaaggcgaggcgggtgttgaagaaaggcaaagggaagaagggcttggccagagttgtgtggagctcggtgacaggggaccctctgatgaagtatgttcagctgatcagggatgatctcaactggtggcttgagttacagaagctaacagagagtgtgggcaatgtcatagcgtctacagctaagagtacgccatccttggtgagagtcaagtcggagcatggctatccagtgtcaaagaagtgcagctatgtcagggagctgcttatcaatgatggtagtcatcgagttgtcctgattgtcgggttatctggtattgggaagtcgtgtcttgctcgacaaatagcttctgacccgcctggtaattttgtggatggtgcaattgagcttagttttgggcggtggtgcagtagagcggcatgcaatggtaatagggatgaataccacaagcgtcttgttcggaaaatatgtaaatttcttgtgcagattggttccatgactgtcaatgaggatgtgggcaaagatcttgaagatgtctgttacttgcttcagactgcattggtaggaaggagcatgctgatcctacttgatgatgtctgggagcaagacatagttgatcgcttcacaaacctatatgataatgattgccggtatcttgtgacaacgagggatgaggcaatttatgagattgcagaagctgaaaaggtggaaatatccaaagatgatatcaaagaaattggcaaggacattcttctctatcatagccttcttactgttgaagagctcccgcctgttgcgtacgacttgctggatcgttgcggccaccatccccttacagttgctgtcatgggtaaggctctcagaaaggagaccagagtcgaaaaatgggatagagcaatctccaacctttccacatatgcaacttgtgcacctggaccggtttcatatgtgaatgagaaagaagtggaaaccacattgaccatctttgggtcttttgagttcagcttagaagcaatgccagaaaattcaagaaggtttttcatggtgcttgcagctatctcatgggatgaacctgttccagaggcttgccttgaatccatgtggtcagcactcatgcaggacactttattccccctcgtggtctcgaaactagtagaaggctcactcattatcaaactggaagaccaatcgatgtatcatatgcatgacatggtttcgctttacctcgagagtaaaacagacaacgctgttcatactcttttgttcggttcatttcctgaatatgctgcattggtgtctccttggcttttcatttttggcaaagagagcgcaaaagagcgagctgaacagaagataagatcattattttctttgctagagttcatggagatagagattttactaggaagcaccacccaagctctcatggaatgcaaatccatatctgaatttgaggctagcaggcttcacttcagcaaaatacttagtcctcgaatagcggagttaatttctgtggggtcaacatctctcattgttactgtcaccaaatctattacagtaatctttttccaaggagattatgctaagcttgctcagtctcttgaaacagcaggttctgtggataaattaattcatgttcttcgtggctgtgaagattcttctactctagccaatgtttctactgttcttgccaagatatctgagcatgttgatgctacaactgctgatgaaattttggcaaccattcctatggaccaaattgcgaaattactctctcctgagaatgaagaatggcatgaaattgtgtttacaactctagcatctttgataaaggtgggaaagttaagggctgttgaaacaatgatcgaatcaggaattgacaagaagcttcttgttcttctaggcagtggttctgagatctcacagcatcatgcgattatcatgctaaaaacattctgtgaacttggtgcgccacttcaggggtgcatgggacctggagcgttgactcatttgccttggcatgctcgtctcagtttggagagatttgttttatttgaccaaaatgtaactccatcaccaaagcctcaacaatcttttgagttgattcttcacaagatactgcacagagacaacaaagataacattgaggcgatccaagcctgcactggaggggaaccatatgtccataggttcttagaggctaacatkgttcatgagctaattgacatgatgcagtgcaacatcaacgatctccaggattcagcatactatgcccttcaccagattatctttgcgaaggggggatcacttgtattacagagatttttacaagcaggaaccattgaaaaattggttaacttgcttgaccgcaagtcttcaaagacaaaggaactaacaatgcagcttctggtagacattgcggtggtcggaaccaaaccttgcatcgaaagaatgctctcgtcccaaatcatcgagaaatttgtggcactcgagaaagcaggtgggtctttcagtggagcggtatcaagatacgtgcaggggttgaacatgtgcaagaacgtccagtctgctgagagatcagtcatgaagcaacagattctgaggaaagtgagatcagagataagaggtcatgatctggaagcaagtctagttgcctctgtggaagcttgcatttctgaaaaaggagccagcagcaggaggaaaaagtag

SEQ ID NO: 100 - protein, 988 aa, Oryza sativa
MDAVNVLASATQLVSAMLTAVGALEQAAADFAEAPRRLQVLEDFVSDLGLLMQQSKQKHAHKMHAPQLERQLQSLGKLMDQLHANITKARRVLKKGKGKKGLARVVWSSVTGDPLMKYVQLIRDDLNWWLELQKLTESVGNVIASTAKSTPSLVRVKSEHGYPVSKKCSYVRELLINDGSHRVVLIVGLSGIGKSCLARQIASDPPGNFVDGAIELSFGRWCSRAACNGNRDEYHKRLVRKICKFLVQIGSMTVNEDVGKDLEDVCYLLQTALVGRSMLILLDDVWEQDIVDRFTNLYDNDCRYLVTTRDEAIYEIAEAEKVEISKDDIKEIGKDILLYHSLLTVEELPPVAYDLLDRCGHHPLTVAVMGKALRKETRVEKWDRAISNLSTYATCAPGPVSYVNEKEVETTLTIFGSFEFSLEAMPENSRRFFMVLAAISWDEPVPEACLESMWSALMQDTLFPLVVSKLVEGSLIIKLEDQSMYHMHDMVSLYLESKTDNAVHTLLFGSFPEYAALVSPWLFIFGKESAKERAEQKIRSLFSLLEFMEIEILLGSTTQALMECKSISEFEASRLHFSKILSPRIAELISVGSTSLIVTVTKSITVIFFQGDYAKLAQSLETAGSVDKLIHVLRGCEDSSTLANVSTVLAKISEHVDATTADEILATIPMDQIAKLLSPENEEWHEIVFTTLASLIKVGKLRAVETMIESGIDKKLLVLLGSGSEISQHHAIIMLKTFCELGAPLQGCMGPGALTHLPWHARLSLERFVLFDQNVTPSPKPQQSFELILHKILHRDNKDNIEAIQACTGGEPYVHRFLEANIVHELIDMMQCNINDLQDSAYYALHQIIFAKGGSLVLQRFLQAGTIEKLVNLLDRKSSKTKELTMQLLVDIAVVGTKPCIERMLSSQIIEKFVALEKAGGSFSGAVSRYVQGLNMCKNVQSAERSVMKQQILRKVRSEIRGHDLEASLVASVEACISEKGASSRRKK

SEQ ID NO: 101 - DNA, 762 bp, Oryza sativa
atggagggacctgatcgatcgccatctgtgatctccgaggatgagaaaaggacccggtcaccgccgtcgacgtttccgatcgacccataccggcctctccggcaaatggagcatgtagcatccatggatggcgaaatgcgaccgatgaaacgaagagcattattacgaggccattcgcagtgcggtgagatgacattcggcctcgtctcgtctcgccagctcgaagattccatgccacgtggaaggcactcggtgacaaaagaaaccgcgttgggtggtcatgctcatgccccagtcggagctgccgccactgccatcgttgaacctaccccaccgccatcatcgagctaccgccgttgcggttcctgccgttggcatcgtcgagcacccgccgtcgtcgttgagttgccaccgcctcccaaggccagatcccgccggatctggcaaggaggggatgaggagtggccggatcctcctccgccgccaccccgacgaggaaaggggaggggggcgcggatagggagggaaagcagcattggcgatggtgggaaaggggagtgtggccggcgatggagcgaaagggagagcggtgccaacgatggtggggaagaggagcgtggacggcggttgggcggagagctgcgaagttgcccgtccacctcgccgtctccgtccggcggctcggtgctgagagagagagagggaggggagaggataaagggaaaaagtgagaaagatggtagtggtgggacctactactag

SEQ ID NO: 102 - protein, 253 aa, Oryza sativa
MEGPDRSPSVISEDEKRTRSPPSTFPIDPYRPLRQMEHVASMDGEMRPMKRRALLRGHSQCGEMTFGLVSSRQLEDSMPRGRHSVTKETALGGHAHAPVGAAATAIVEPTPPPSSSYRRCGSCRWHRRAPAVVVELPPPPKARSRRIWQGGDEEWPDPPPPPPRRGKGRGARIGRESSIGDGGKGECGRRWSERESGANDGGEEERGRRLGGELRSCPSTSPSPSGGSVLREREGGERIKGKSEKDGSGGTYY

SEQ ID NO: 103 - DNA, 1587 bp, Oryza sativa
atgatgacagcttctctgcatccatgtgtctgcaaggcctctcctgccttcagacctgcctcttctctgggtgcaagaacccagccaaaatccacagccacaaacccaaagagacctttgtttcaggagcttcagaggcgactttctttcaggattgacgaagcctcaaaggcgctggagacagcaaaacaggggcttttggatgcgttggtcgactcaaccttcaagttttctgaccaacctatgctcccatcagagaacaattttgccccagtcaatgagatcagtgaagccatagagattctgcagattgaaggagagatacctgaagatttcccagagggttccaatccactgtttggagccctccattcgaccgtctcaatcttcggaaaatccagcgaaatatgggttgaaggcgagggcatgctccatgccatctacttcacaaagaacagttcagatacttggtcagtctcctatgcaaatcgatatgtgcaatctgaaacattaaagattgagaaaaccagacagaagccatgtttcctccctgccatcatgggcgactctgcagccatcgtcgcggcctacattctcaactatatgaggtttggcaaagtgaacaagaacatcagcaacaccaatgtatttgagcatgctggaaaggtgtatgctgtttctgagaaccacctgcctcaggaaatcagcattcagaatctcgacacgggtgatagctgggacattaatggggaatggaaaaggcctttcacagctcacccaaaggtatggctggtcattttctctgatggaactcaactaaaacataaagttgacctcaaactggacagatgtatactctgccatgacataggagttactgttaagtacaacataataatggacatacctcttaccatcgacatcagtagacttatcagaggcaatcagttgatcaagtttgagaaggacagctatgcaagaataggagttatgccccgttatggtgatgcagaatcagttatgtggtttgacgttgaaccattctgcatgttccattttatcaactgctttgaagagggtgatgaggttgttatcaggggctttcgtgcggctgactccatcattccaggccctcggatcagcctaaacaaaaatgatttgctctctgatccttctaagtgttctgtgaaacaaggaattaatgaagaatttttctctcgattataccagtggagattaaacacgaagacaaaggctgtttcagggcaatatttaagtggaactgagttttccatggaattccctgtgatcaatgaccactacacaggcttgcatcatagttatgcctatgcacaagtggtggattctttggaaagctcttacggcgttaatgagaaagtaatcctgaaatatggaggccttgcaaaactttgtcttgaagaggcagataatgtaattgcagaggtgcacattattgacgcccaaacatttgaaggtgctcctgtggccaaaatagtattgccacaaagagtaccctatggttttcatggaacgttcagatcatcactagcaaacacaatgacgtga

SEQ ID NO: 104 - protein, 528 aa, Oryza sativa
MMTASLHPCVCKASPAFRPASSLGARTQPKSTATNPKRPLFQELQRRLSFRIDEASKALETAKQGLLDALVDSTFKFSDQPMLPSENNFAPVNEISEAIEILQIEGEIPEDFPEGSNPLFGALHSTVSIFGKSSEIWVEGEGMLHAIYFTKNSSDTWSVSYANRYVQSETLKIEKTRQKPCFLPAIMGDSAAIVAAYILNYMRFGKVNKNISNTNVFEHAGKVYAVSENHLPQEISIQNLDTGDSWDINGEWKRPFTAHPKVWLVIFSDGTQLKHKVDLKLDRCILCHDIGVTVKYNIIMDIPLTIDISRLIRGNQLIKFEKDSYARIGVMPRYGDAESVMWFDVEPFCMFHFINCFEEGDEVVIRGFRAADSIIPGPRISLNKNDLLSDPSKCSVKQGINEEFFSRLYQWRLNTKTKAVSGQYLSGTEFSMEFPVINDHYTGLHHSYAYAQVVDSLESSYGVNEKVILKYGGLAKLCLEEADNVIAEVHIIDAQTFEGAPVAKIVLPQRVPYGFHGTFRSSLANTMT

SEQ ID NO: 105 - DNA, 1192 bp, Oryza sativa
atggccacctcccacctcctcgccgccgcctcctccaccgccgcctcctccgccaccttccgccctcccctcctcagcctccgctccccgccgccctcttctctccgcctcaaccgttccaggtggtccgcgcggccgagaccgacaaagagacccgagaaagctcccgcgggaggctccagcttcaaccagctgctcggcatcaagggcgccaagcaagagaacatatggaagattcgccttcaacttactaagccagtgacatggcctccgcttgtatggggagtgctttgtggagcagctgcctctgttcaggaaatttccactggacagttgaagatgttgcaaaatctattgtctgcatgataatgtctggtccatgtcttacaggatacacacagagacaattaacgactggtatgatcgagatatagatgcgataaatgaaccttaccgtcctattccttcaggcgctatatcagaaaatgaggtcattactcaaatttgggcactgttgttagcagggcttggcctgggtgctctgttagatgtatggggcaggacatgattttcctattattttttatcttgctgttggtgggtccttgctttcttacatatattcagctccacctctgaagagctcaagcagaatggatggattggaaactttgctcttggtgcgagctacattggcttgccctgggtgggctggccaggcattatttggaacccttactcctgatattgttgtcctgacttctttgtatagcatagctggggctagggattgctattgtaaatgactttaagagtgttgagggagatagagctctggggcttcagcagtcactcccggttgcttttggtatggaaactgcaaagtggatatgtgtaggagcgattgacataactcaattatccgttgcagtaccttttcagttccggcaagccttattatgccctggcactgctaggactcacaattcctcaggtggtctttcaggcagttccaatacttcctcaaggaccctgtgaagtatgacgtcaaataccagcaggcaagcgcgcaaccgttcttcgtcttgggccttctggtgaccgcccttgcaaccagccactgatgaaagcagcaatcgccctggactgtgattctgtgacagcgaagttttgggtggaagatgcagattga

SEQ ID NO: 106 - protein, 83 aa, Oryza sativa
WPPPTSSPPPPPPPPPPPPPPSPPQPPLPAALFSPPQPFQVVRAAETDKETRESSRGRLQLQPAARHQGRQAREHMEDSPSTY

SEQ ID NO: 107 - DNA, 2223 bp, Oryza sativa
atggcgatcgaggccatgcggcactgcagcagcagcagcagcagcgaggaaggaggagcggcggcgacgacggcggccagatcagcagtacgggagcgcctccaattagcgccgccgtcgccgtcgccgtcgccgtacgacacggcgtgggtggccatggtgccggccctccgccgtggcggcggcggcccgcggttcccgcagtgcgtcgcgtggatccagcggaaccagcggggcgacgggtcatggcgccacgcggcggcggcgcaccagcagctcggctcctcgccggagatcgtcaccgagcgcgacctctcgtccaccctcgcctgcgtcctcgcgctcgcgcgatgggacgccggcagtgagcacgtcaggagagggctgcagtttatcgggaggaacatgtcggtcgccatggacgatcagacggctgctccggcgtctggttccgtcgtcagtttcgcagcgatgctccggatggcgatggagatgggtttggaggttcctgccgtcagccaagctgacgtccgcgacagagatgctggggtgatctgccacggtggaagaacagaatatacggcttatgtctcagaaggattaggcaatattcagaactggaatgaagtgatgaaattccaaagaaagaatggctcactgttcaactccccttacacaactgcagctgcattagtccacaactatgatgccaaagctctccagtacttagacatgcttctggacaaatttggaagtgcagtgccagcggcctatcctgcaaatattcagtctcagctctacatggtggatgtgcttgaaaagatgggaatatctaggcattttgttggtgagataaagagcatactggacatgacctacagttgctggaaacagagggatgaggaaattgtgcttgacatgcaaacatgtgggatggcatttcgtatgttgcgtatgaatggatatgatgtttcttcagatgagctatctcatttttctgaaccttcaagtttccacaattcacttcaaggatatctgaatgatacaagatctttattagaattacataaggcttcaaaagtcagtatcgcagaaaaggaggttgaatatgctcttgaatttcccttctataccatcttggatcgtctagaccataaaagaaatatcgaacattttgacattacaagcagtcagatgctagaaacagcgtacttgccatgtcattccaatgaagaaatcatggccttgggtgtgagagattttagtagctctcagtttattttccaagaagagctgcagcaactcaacagctgggtgaaagagagcaggttggatcagctgcaattcgcacggcagaagttggactacttctatttctctgctgctgctaccattttcactcctgaactgtcagatgttcgcattttgtgggccaaaaatggcgtgctgacaacggtcgtcgacgacttcttcgacgttggaggatcaaaagaagaactggaaaacctcgtcgcattagttgagaagtgggacaagaatgacaaaactgagtactactctgaacaagtagagattgtgttctctgcaatttatacttcaactaaccagcttggatcaatggcctctgtagtacaaggccgtgatgtcaccaaacaccttgtagaaatatggcaagaattgctgaggtctatgatgacagaggtagagtggaggcagagccggtatgtgccaacagcagaggaatacatggaaaatgcagttgtgacatttgcactgggacccgttgtgctcccagcattgtatcttgttggaccaaagatccctgattctgtcataagaagccaagaatgcagcgagttgttccggctaatgagcaaatgtggccgtctcctgaatgatgtccaatcctacgagagagagggcagccagggcaagctgaacagcgtctctctgcttgccctccacagtggaggctctgtctccatggaagaggctgtgaagcagattcagagacccatcgagaaatgcaggagagagttgctgaagctggtcgtcagcagaggaggcgccgttccaaggccatgcagggagctgttctggagcatgtgcaaggtctgccacttcttctactccggcggcgacgggttcagctcgccgacggcgaaggccggcgcgttggacgcggtgatccacgagccgctgaatctgtcttgttctgtgtga

SEQ ID NO: 108 - protein, 740 aa, Oryza sativa
MAIEAMRHCSSSSSSEEGGAAATTAARSAVRERLQLAPPSPSPSPYDTAWVAMVPALRRGGGGPRFPQCVAWIQRNQRGDGSWRHAAAAHQQLGSSPEIVTERDLSSTLACVLALARWDAGSEHVRRGLQFIGRNMSVAMDDQTAAPASGSVVSFAAMLRMAMEMGLEVPAVSQADVRDRDAGVICHGGRTEYTAYVSEGLGNIQNWNEVMKFQRKNGSLFNSPYTTAAALVHNYDAKALQYLDMLLDKFGSAVPAAYPANIQSQLYMVDVLEKMGISRHFVGEIKSILDMTYSCWKQRDEEIVLDMQTCGMAFRMLRMNGYDVSSDELSHFSEPSSFHNSLQGYLNDTRSLLELHKASKVSIAEKEVEYALEFPFYTILDRLDHKRNIEHFDITSSQMLETAYLPCHSNEEIMALGVRDFSSSQFIFQEELQQLNSWVKESRLDQLQFARQKLDYFYFSAAATIFTPELSDVRILWAKNGVLTTVVDDFFDVGGSKEELENLVALVEKWDKNDKTEYYSEQVEIVFSAIYTSTNQLGSMASVVQGRDVTKHLVEIWQELLRSMMTEVEWRQSRYVPTAEEYMENAVVTFALGPVVLPALYLVGPKIPDSVIRSQECSELFRLMSKCGRLLNDVQSYEREGSQGKLNSVSLLALHSGGSVSMEEAVKQIQRPIEKCRRELLKLVVSRGGAVPRPCRELFWSMCKVCHFFYSGGDGFSSPTAKAGALDAVIHEPLNLSCSV

SEQ ID NO: 109 - DNA, 1658 bp, Oryza sativa
  misc_feature (62)..(62): k = guanine or thymine
  misc_feature (700)..(700): s = guanine or cytosine
atggtgcgggacgcggtggactaccggggatgcccggcggacaggtcggcgacgggggggtkggttgcagcggcgctggtgctggggatcgagctgtgcgagcggctgtcgacgatggggatcgcggtgaacctggtgacaacgtcgtcaccgacttcatgggcacctccttcctcctctgcctcctcggcggcttcctcgccgactccttcctcggccgctacctcaccatcgccgtcttcgccctcgtccagtccatcggcaccgccctcctcgccgcctccaccctcgtcacccacctccgcccgccgcccggggagcagccgacgccggtgcagatggccgtgctctacgcctgcctctacctcatcgccctcggcaccggcggcctcaagtccagcgtctccggcttcggcaccgaccagttcgacgaccgcgacggccgggagcgcgccgccatgggcctcttcttcaaccgcttcttcttcttcatcagcctcggcacgctgctcgccgtcaccgtgctcgtctacgtccaggaccacgtcggccggagctgggcctacggcatctgctccgccgccatgctcgccgccatcgccgtcttcctctccgggaccaggaggtaccgctacaagcggagctccgggagccccatcgtccacatcctccaggtgctcgtcgccgcggcgcggaagcscggggtcgtcaagcgcccgcccaccgcggcggagctctacgaggacgaccgccccgagcacgcccggatcgcgcacaccgcgcagttcccgtgcctggacatggcggcggtggtggccggcgaagaggacaacgaggtggccgggccgggcgggccggcggcgcccaacccgtggaagctctgctcggtgtcgcgcgtggaggaggtgaagatggtggcgaggctgatgccggtgtgggcgacgacgatcctcttctggaccatctacgcgcagatgatcaccttctccgtggagcaggccaccaccatggaccgccgcgtcggcgccggcttcgagatcccggccgcctcgctcaccgtcttcttcgtcggcgccatcatgctcaccctcgccgtctacgaccgcgtcttcatcccgctctgccgcgtactcaccggcaagcaaggcttcaccaacctggagaagatcggcatcggcctcgccctctccatcctcggcatggccgccgccgcgctctgcgagaagaagcgcctcgccgtcgccgtcgccgccaccaccgggaactccacgccgatcagcgtgttcctgctgacgccgcagttcctgctggtgggcgccggcgaggcgttcatctacacggggcagctggacttcttcatcacgaggtcgcccaaggggatgaagacgatgagcacggggctcttcctgacgacgctctcgctcggcttcttcttcagcagcgtgctcgtgtcgctcgtcaagggcgccaccacctggctcggcgacaccatcgaccgcagccgcctcgactacttctactggctcctcgccgtcctcagcgtcctcaacctcgccgcctacctcgtctgcgccaagtgggccgccaccgccgccgccacctcgcgggagcagcagcagcagcacaccgccgtcgccgacgccgacgagaaatgctag

SEQ ID NO: 110 - protein, 565 aa, Oryza sativa
  X_region (104)..(111): Xaa = any naturally occuring amino acid
  X_region (240)..(240): Xaa = any naturally occuring amino acid
  X_region (242)..(242): Xaa = any naturally occuring amino acid
  X_region (387)..(387): Xaa = any naturally occuring amino acid
  X_region (427)..(427): Xaa = any naturally occuring amino acid
  X_region (498)..(501): Xaa = any naturally occuring amino acid
GAGRGGLPGMPGGQVGDGGVGCSGAGAGDRAVRAAVDDGDRGEPGDNVVTDFMGTSFLLCLLGGFLADSFLGRYLTIAVFALVQSIGTALLAASTLVTHLRPPXXXXXXXXPGEQPTPVQMAVLYACLYLIALGTGGLKSSVSGFGTDQFDDRDGRERAAMGLFFNRFFFFISLGTLLAVTVLVYVQDHVGRSWAYGICSAAMLAAIAVFLSGTRRYRYKRSSGSPIVHILQVLVAAARXKXGVVKRPPTAAELYEDDRPEHARIAHTAQFPCLDMAAVVAGEEDNEVAGPGGPAAPNPWKLCSVSRVEEVKMVARLMPVWATTILFWTIYAQMITFSVEQATTMDRRVGAGFEIPAASLTVFFVGAIMLTLAVYDRVFIPLCRVLXTGKQGFTNLEKIGIGLALSILGMAAAALCEKKRLAVAVAXATTGNSTPISVFLLTPQFLLVGAGEAFIYTGQLDFFITRSPKGMKTMSTGLFLTTLSLGFFFSSVLVSLVXXXXGRHHWLGDTIDRSRLDYFYWLLAVLSVLNLAAYLVCAKWAATAAATSREQQQQHTAVADADEKC

SEQ ID NO: 111 - DNA, 976 bp, Oryza sativa
atggaggtttgcgccgcccgggccccaggcaagattatccttgccggcgagcacgccgtcgtccatgggctcagccgccgtcgccgccgccatcgacctctacacgcgctgctcccttctgccttggagctggacctcaaggatcctggcctcaccttctcgtggctggcctccattgccaggctcttggaggagcacgagatccctgaggccaagatctggctctccgccggtctctctgccttcctcttcctctacacctccatattgggtcggacctgcccatggggtcggggcttgggtcatcggccgccttctgcgtgtcgatgtcgggggtgttgctgacagctgccggcgtgcttgagctagttaaccggtgggctttccagggggagaagattatccatgggaagccttctggcatcgacaatgctgtcagcactttcgggaagcatgatcaaattcaagaaaggggaattgacaaaccttaaatctagcaacccagtgaaaatgcttattacggatacaagagttggtaggaacacaaaggctctggttgctggtgtctctgaaagagcctccaggcattcagatgctatggcttctgtattcaacgcagtgaactccattagtgaagaggtgtcaagcattgttgagttagcagctaatgatgagatagctatcacctcaaaggaggaaaagctggcggaactcatggagatgaaccaaggtttgcttcagtgcatgggtgttagccattcttcaatagaaactgtactgcggacaacattgaaattcaacttggtctccaagttaacaggagctggaaggtggttgtgttttgaccctgataccaactaaagtcattgcagagctggagtcgcatagttttcgctgctttaaagttgaggttggtggacagggtcttcaagtttgccaaggaggctgctcctattttaatggagatgttgtataa

SEQ ID NO: 112 - protein, 323 aa, Oryza sativa
MEVCAARAPGKIILAGEHAVVHGLSRRRRRHRPLHALLPSALELDLKDPGLTFSWLASIARLLEEHEIPEAKIWLSAGLSAFLFLYTSILGDLPMGSGLGSSAAFCVSMSGVLLTAAGVLELVNRWAFQGEKIIHGKPSGIDNAVSTFGSMIKFKKGELTNLKSSNPVKMLITDTRVGRNTKALVAGVSERASRHSDAMASVFNAVNSISEEVSSIVELAANDEIAITSKEEKLAELMEMNQGLLQCMGVSHSSIETVLRTTLKFNLVSKLTGAGGGCVLTLIPTKVIAELESHSFRCFKVEVGGQGLQVCQGGCSYFNGDVV

SEQ ID NO: 113 - DNA, 2138 bp, Oryza sativa
atggcgctcacgacgttctccatttcgagaggaggcttcgtcggcgcgctgccgcaggaggggcatttcgctccggcggcggcggagctcagtctccacaagctccagagcaggccacacaaggtctgtgtggtcgattgctgctacggtactgggctattggctctgttcttacgctatggtttgttgttgctgcattcgccattgcaggctaggcggaggtcgtcgtcgagcatctcggcgtcgctgtccacggagagggaggcggcggagtaccactcgcagcggccaccgacgccgctgctggacacggtcaactaccccatccacatgaagaacctgtccctcaaggagctccagcagctcgccgacgagctccgctccgacgtcatcttccacgtctccaagaccgggggacatctcgggtccagcctcggcgtcgtcgagctcaccgtcgcgctccactacgtgttcaacacgcctcaggacaagatcctctgggacgtcggccaccaggtcgtaccctcacaagattctgaccgggcggcgcgacaagatgccgacgatgcgtcagaccaacggcttgtcgggattcaccaagcggtcggagagcgagtacgactccttcggcaccggccacagctccaccaccatctccgccgccctcggggatggcggtggggagggatctcaagggagggaagaacaacgtggtggcggtgatcggcgacggcgccatgacggccgggcaggcgtacgaggcgatgaataacgcggggtatctcgactccgatatgatcgtgattctcaacgacaacaagcaggtgtcgctgccgacggcgacgctcgacgggccggcgccgccggtgggcgcgctcagcagcgccctcagcaagctgcagtccagccgcccactcagggagctcagggaggtggcaaagcagggcgtgacgaagcaaatcggagggtcggtgcacgagctggcggcgaaggtggacgagtacgcccgcggcatgatcagcggctccggctcgacgctcttcgaggagctcggcctctactacatcggccccgtcgacggccacaacatcgacgacctcatcaccatcctccgcgaggtcaagagcaccaagaccacaggcccggtgctcatccacgtcgtcaccgagaaaggccgcggctacccctacgccgagcgcgccgccgacaagtaccacgggcgtggcgaagttcgatccggcgacggggaagcagttcaagtcgccggcgaagacgctgtcgtacacgaactacttcgcggaggcgctcatcgccgaggcggagcaggacaacagggtcgtggccatccacgcggccatggggggaggcacggggctcaactacttcctccgccgcttcccgaaccggtgcttcgacgtcgggatcgccgagcagcacgccgtcacgttcgccgccggcctcgcctgcgagggcctcaagccgttctgcgccatctactcctccttcctgcagagaggctacgaccagcaggtggtgcacgacgtggacctccagaagctgccggtgaggttcgccatggacagggccgggctcgtgggcgccgacgggccgacgcactgcggcgcgttcgacgtcacctacatggcgtgcctgccgaacatggtcgtcatggccccgtccgacgaggcggagctctgccacatggtcgccaccgccgcggccatcgacgaccgcccctcctgcttccgctacccaagaggcaacggcatcggcgtcccgcttaccacccaactacaaaggcgttcccctcgagggtaggcaaagggagggtactgctggagggcgagagggtggcgctgcttgggtacggttcggcggtgcagtactgcctcgccgcagcgtcgctggtggagcggcacggcctcaaggtgaccgtcgccgacgcgaggttctgcaagccgctggaccaaacgctcatcaggaggctggccagctcccacgaggtgctcctcaccgtcgaggaaggctccatcggcgggttcggctcccacgtcgcgcagttcatggccctcgacggcctcctcgacggcaaactcaaggtaattttcgtctcgctattgaccaacatcccgtcttag

SEQ ID NO: 114 - protein, 488 aa, Oryza sativa
MAVGRDLKGGKNNVVAVIGDGAMTAGQAYEAMNNAGYLDSDMIVILNDNKQVSLPTATLDGPAPPVGALSSALSKLQSSRPLRELREVAKQGVTKQIGGSVHELAAKVDEYARGMISGSGSTLFEELGLYYIGPVDGHNIDDLITILREVKSTKTTGPVLIHVVTEKGRGYPYAERAADKYHGRGEVRSGDGEAVQVAGEDAVVHELLRGGAHRRGGAGQQGRGHPRGHGGRHGAQLLPPPLPEPVLRRRDRRAARRHVRRRPRLRGPQAVLRHLLLLPAERLRPAGGARRGPPEAAGEVRHGQGRARGRRRADALRRVRRHLHGVPAEHGRHGPVRRGGALPHGRHRRGHRRPPLLLPLPKRQRHRRPAYHPTTKAFPSRVGKGRVLLEGERVALLGYGSAVQYCLAAASLVERHGLKVTVADARFCKPLDQTLIRRLASSHEVLLTVEEGSIGGFGSHVAQFMALDGLLDGKLKVIFVSLLTNIPS

SEQ ID NO: 115 - DNA, 2093 bp, Oryza sativa
  misc_feature (1450)..(1450): m = adenine or cytosine
atgtggcggctaagagtcgcggaggaggccggcgccggcggcaaggggtggctgagctccaccaacgcgcacgtcggccggcagaagctgggcgaggatgaagatgtcacagaagaagcggtgctgacctctttgaaaagggcgattcggcgttattctactcttcaggcacatgatggacactggcctggggattatgctggtcccatgttccttcttccaggcttgatagtactgcatgtgactggtgcactaaatactgtgctatcaacagaacatcaaaaggagattcgccggtatctctataatcatcagcagaatgaagatggaggctgggggctgcacattgagggcacaagcaccatgttctgtactgtcttgacttatgttaccttgagattacttggagacgaatcagatggtggagatggagccatggtgatagctcgaaattggattttagatcatggaggagcaactttcacaacatcatggggaaaattttggctttcagtacttaaggtacttggtgtctttgactggtctggtaacaacccattgcttccagaattgtggatgctaccttatttcctcccatttcatccagccaggacggatatggtcccactgccgaatggtatacttgcctatgtcttatatttacggaaagaagtttgtcggcccaattacaccaatagtactgaccctacgaaaggagctctacaatataccctatgatgatattaattgggacaaggctcgtaaccaatgcgctaaggaggatctgtactaccgtcatccattagggcaagatatcctatgggccactctttacaaatttgttgaaccagttctatcgcattggcctggcagcaaattgagagagaaagctctgaagaatgccatgcagcatattcattacgaagatgagaatactcgatacatttgcagcggtgctgtacagaaggtattaaatatgctttcttgctggatagaaaatcctaactcagaggcattcagatttcatattccaagggttcatgattacttgtgggtcgctgaagatggcatgaagattagggttacaatggcagccagctctgggacacagctttcacagttcaagctatactggctaccaaccttatagaagattttggtcctactattaaattagcccatggctacataaaaaactcacagcttcatgactgccccggagatttgagttaccggtatcgccatatatataaaggtgcatggaccttttctactgctgatcaaggttgggctgtatcagatagcactgcagaaggattaaagcttcaggcctcattgttgttatcaaaaatttctctggaaattgttggtgaaccattaaaaggtggttttgcaacatatgaactcacaaggtcttatgcctggctggagattctcaatccttctgagmcctttggggacataatgattgattacccacttcgggggtgatccagggtttgacagcatttaggaagcactatcctggacaccgcagggaagaaatagacaattgtatccaaaaggctgatagtttcattcagagtattcagagaagtgatggttcatgtacggctcctgggctgtttgtttcacttctcggacatggttcggagcgaagggattaattgctgctggaagaacgtacgagaactgtcctgcaatcagaaaggcatgcaacttcttgttgtcaaaagagcttccttgtggtggttggggagaaagccatttgtcttgcaaaggtttacaccaatcttgaaggagaacgtccccacggagtaaacaccagttgggccatgcttgcgctaattgatgccggacagagagatccagcgccgttgcaccgagcagctaggattcttatcaacctacaattagaggatggggagttccctcagcaacaacaggagatcatcggagcattcagcaaaaactgcgccatcagctactctcagtacaggaacatattccctatttgggctctcggagagtaccgctgccgagtcttgttaggcaggcaggatgcatcggtgaccggcaacactgctagctga

SEQ ID NO: 116 - protein, 721 aa, Oryza sativa
  X_region (79)..(79): Xaa = any naturally occuring amino acid
  X_region (360)..(361): Xaa = any naturally occuring amino acid
  X_region (403)..(403): Xaa = any naturally occuring amino acid
  X_region (444)..(459): Xaa = any naturally occuring amino acid
  X_region (502)..(502): Xaa = any naturally occuring amino acid
  X_region (512)..(515): Xaa = any naturally occuring amino acid
  X_region (559)..(559): Xaa = any naturally occuring amino acid
  X_region (616)..(616): Xaa = any naturally occuring amino acid
  X_region (649)..(649): Xaa = any naturally occuring amino acid
MWRLRVAEEAGAGGKGWLSSTNAHVGRQKLGEDEDVTEEAVLTSLKRAIRRYSTLQAHDGHWPGDYAGPMFLLPGLIVXLHVTGALNTVLSTEHQKEIRRYLYNHQQNEDGGWGLHIEGTSTMFCTVLTYVTLRLLGDESDGGDGAMVIARNWILDHGGATFTTSWGKFWLSVLKVLGVFDWSGNNPLLPELWMLPYFLPFHPPGRIWSHCRMVYLPMSYIYGKKFVGPITPIVLTLRKELYNIPYDDINWDKARNQCAKEDLYYRHPLGQDILWATLYKFVEPVLSHWPGSKLREKALKNAMQHIHYEDENTRYICSGAVQKVLNMLSCWIENPNSEAFRFHIPRVHDYLWVAEDGMKXXGYNGSQLWDTAFTVQAILATNLIEDFGPTIKLAHGYIKNSQXLHDCPGDLSYRYRHIYKGAWTFSTADQGWAVSDSTAEGLKXXXXXXXXXXXXXXXXLQASLLLSKISLEIVGEPLKGGFATYELTRSYAWLEILNPSEXFGDIMIDYPXXXXTSGVIQGLTAFRKHYPGHRREEIDNCIQKADSFIQSIQRSDGSXYGSWAVCFTSRTWFGAKGLIAAGRTYENCPAIRKACNFLLSKELPCGGWGESHLSCXKVYTNLEGERPHGVNTSWAMLALIDAGQEIQRXPLHRAARILINLQLEDGEFPQQQQEIIGAFSKNCAISYSQYRNIFPIWALGEYRCRVLLGRQDASVTGNTAS

SEQ ID NO: 117 - DNA, 1566 bp, Oryza sativa
atgcccgcgcagaagcggccggcaccggaggcggcgtcggctccagcggggggagacgggcacgtggaaggaggaggtgctggtggtggtggtggcgcggacgaggacgcccaccgcggcggggagcgctccccgaaggtgatgaacggtggcgggccggagaaggagaaggagcggcgggacgctgattctgatgcggaggaagaggaggaggaggccggcggcggcggtggtggtggaggggccgacgaagaccgcgacagcccgtcttcggagagcgacggcgacatggacgagtttatactagtgaaattaatggatatacggaaagaagtgcagtgccctatatgcttaggcattatccggaagacaaggacagttatggagtgtttgcaccggttttgtagggattgcatagataaatccatgcgactaggaaataatgaatgcccagcatgccgcacccattgtgcaagtagacgttctttgagggatgatcctaattatgatgctttaattttggctttgtatccagatattgacaagtacgaggaagagatccaagcatccatcgctgaaacatttcgaagacaatcagaagcactcgtgaagaagcgttccgttgcaaaagcaacaggttcaactattacgagaaggaccaggggtaatatgcgcgcaaaaaggaggggacgaactagttcccctgatattgttgcaactgacaatgaggatgaggatagagatgaaaatggcaatgagggcagcaaagagtcgtcttctgttgatgaccgttccccagatgtaaggcagaaaagagttcggaggtggcccgtgccacgatcatcccctgctaagagcattgggggtattgatagtagctttgaggatattgatgacttaggaagtggcagagatatcatgagtacttctccactacgcggagagatgcttgcctggggaaaaaatggcacccgcagtcaaacccggcatggcaattctggtggttccagtggaaggatggcaaagggtggtcgtgttaccaagttggttgaatacctacgtaataccgatgaattcgataataagttcaacttatatcttgttctacttccacttaatggacaaagcatgcctaaattggagaagccctatctcagttgccaaccgacattctctgttcgccatctttgccagaagtggagatattcatcaggaagaaccccaacaatggatgctttgcattccatagatactagtgcagatgagataaaactgaatcatgacgccttagaaagattggaggaagagaaatctctttcagagctgtacccttcacttgcctctggccatggggatctggctccatggactcggtacggtgccttgaacaatgaacagatggtgggttgcaggaagaatcgtgaagtgatcaagttgctgttgaccggtgcaggtctgaccgtctgccatgccatgttaccgctgaaactagccgactggccttcgacgctcacgcagtcccgctgccagtcaaactggccgatgagtttggtacttgagatttga

SEQ ID NO: 118 - protein, 521 aa, Oryza sativa
MPAQKRPAPEAASAPAGGDGHVEGGGAGGGGGADEDAHRGGERSPKVMNGGGPEKEKERRDADSDAEEEEEEAGGGGGGGGADEDRDSPSSESDGDMDEFILVKLMDIRKEVQCPICLGIIRKTRTVMECLHRFCRDCIDKSMRLGNNECPACRTHCASRRSLRDDPNYDALILALYPDIDKYEEEIQASIAETFRRQSEALVKKRSVAKATGSTITRRTRGNMRAKRRGRTSSPDIVATDNEDEDRDENGNEGSKESSSVDDRSPDVRQKRVRRWPVPRSSPAKSIGGIDSSFEDIDDLGSGRDIMSTSPLRGEMLAWGKNGTRSQTRHGNSGGSSGRMAKGGRVTKLVEYLRNTDEFDNKFNLYLVLLPLNGQSMPKLEKPYLSCQPTFSVRHLCQKWRYSSGRTPTMDALHSIDTSADEIKLNHDALERLEEEKSLSELYPSLASGHGDLAPWTRYGALNNEQMVGCRKNREVIKLLLTGAGLTVCHAMLPLKLADWPSTLTQSRCQSNWPMSLVLEI

SEQ ID NO: 119 - DNA, 474 bp, Oryza sativa
atgacggcgaagcatgcgcagacggagggagtacttaccagatcgctgaggttgccggtgtcaggcttgggctccaggagcggcgctgccgctgctgtgtccaccgtcaccgccaccgacgatgacgaatcttggcgacaatccgctgctgctgctgctggtgatgatggtgatggtgaccgtggtggtggtggtgatggtgattatggtgatgatgcggcggctgggtgtggtggtggtgatggtggtggtggtggtgatgatgatgatgatgaaataaggaggtggctgctagcgcgtctccttcttgacctccggcacaaggaggttatagagctcgagctcgacaaggcagcccccggtgagcgtttcctccattgccttcgaagtgaggctgtagagagcgagctcgatgaggcagcgctgccgctgcttctccccctcctccccaacactcacttcggattgagctag

SEQ ID NO: 120 - protein, 157 aa, Oryza sativa
MTAKHAQTEGVLTRSLRLPVSGLGSRSGAAAAVSTVTATDDDESWRQSAAAAAGDDGDGDRGGGGDGDYGDDAAAGCGGGDGGGGGDDDDDEIRRWLLARLLLDLRHKEVIELELDKAAPGERFLHCLRSEAVESELDEAALPLLLPLLPNTHFGLS

SEQ ID NO: 121 - DNA, 573 bp, Oryza sativa
atgcctcctgctttgcaagaatcttgcctccctgatttggcagtcatcaaagcagaggctgatgtgcaaagcatcaggactgctgctgctgaagcatggaaaaaacagatggttggtttctttctgttgaatcctattcctatttttcttctttggaggagggagagtacaaaaggtgcattggcatcccccggacgtacactcgccaacagccccagcacctatttgcgacttgcagttatcatcgcacgttgtgggagaacaggggccgggtacgttgacgctctgacaatcggccgacaccttcatcgacatatctgcaaattcagatcaaatcaaaacttattaagttttcacatgtgcgtattctatataatcaaaaagaaaagacgatcttcgtcatataaatcgatatataaacagtactacctccatcgatcgtacaagtacttcattttatttctagatatgaacttggataagagaaaagaaatggagttattttgggacgacgagaaatttacccgaatagtgggccgtgagagaaagggccagcagcagcgtgcagagtag

SEQ ID NO: 122 - protein, 190 aa, Oryza sativa
MPPALQESCLPDLAVIKAEADVQSIRTAAAEAWKKQMVGFFLLNPIPIFLLWRRESTKGALASPGRTLANSPSTYLRLAVIIARCGRTGAGYVDALTIGRHLHRHICKFRSNQNLLSFHMCVFYIIKKKRRSSSYKSIYKQYYLHRSYKYFILFLDMNLDKRKEMELFWDDEKFTRIVGRERKGQQQRAE

SEQ ID NO: 123 - DNA, 1998 bp, Oryza sativa
  misc_feature (26)..(26): y = cytosine or thymine
  misc_feature (52)..(52): y = cytosine or thymine
  misc_feature (120)..(120): y = cytosine or thymine
  misc_feature (129)..(129): m = adenine or cytosine
atgaccgcacctttccctttgccctycaagccgccgccgcggctgtcgcttycgccgaggataagggcctcgagctgcacgcctcggctctcaggcgggggcaccctggctgacgtcttyacgggcaamaccctcgtcgcgttctacgcggcctgtggaaaggcctgcgacgcgcgcagggtgttcgacgaaatgcctgagcgggacgttgtctcgtggaactcgcttgtgtcagcgttcttggtgaacggtatgtttcatgacgcgagacgggcgctggtgagcatgatgaggagtgggtttcctttgaacgtggcaagcttagtgtcagttgtgcctgcctgcggcacagagcaagaggagaagtttgggttgagcatccatgcgttggcagtgaaagttggcttgaacaccatggtgaatctcgcgaatgcgttggttgatatgtatggtaagtttggggatgttgaggcatcgatgcaggtgtttgatggaatgctggaacaaaatgaggtttcttggaattctgcaataggatgctttcttaatgcagggttttatggtgatgtgctgagaatgtttaggaaaatgtcagagcataatgtcatgccaggttctatcacattgtctagtttgcttcctgcattggttgagcttggaagttttgatttgggaagggaggtgcatgggtatagcataaagagagcaatggacttggatatttttgttgccaactcacttgttgatatgtatgccaaatttggttctttggagaaagcatctaccatctttgaacaaatgaaggaccgcaatgttgtgtcatggaatgcaatgatcgcaaatcttgtgcaaaatggagctgagactgaggcgttcaggcttgtcacagatatgcaaaaaagtggggaatgcccaaattctatcacactagtgaatgtgcttccagcttgtgcgaggatggcctctctaaagatgggtaagcagatccatgcatggtcgatccgtagaggcttaatgttcgatttgttcatatcaaatgccctgattgatatgtattccaaatgcggacagctgagcttggcacggaatatttttgaaaggtcagagaaggacgatgtatcgtacaatactttgattttgggatattcacagagtccatggtgttttgaatctcttcttctttttaagcagatgaggtctgttggaattgattatgatgctgtttccttcatgggagctctatcagcatgtaccaacttatctgtatttaagcatggcaaagaaattcattgtgttttggttaggagattgttaagtggccatccctttctttctaattccttgctggacttgtacactaaaggtggaatgcttgtcactgcatcaaagatttttaataagattacaaagaaggatgttgcttcatggaatactatgatattgggatatgggatgcatggtcaaattgatattgcatttgaattgtttgaactgatgaaaggtgatggtctggactatgatcatgtatcctacattgcagtgcttgcagcatgtagccatggtgggcttgtagacaaagggaagaaatacttcagtcagatggttgctcaaaatattgagccacagcaaatgcactatgcttgcatggttgatcttcttgggcgtgctggacaactgtctaaatgtgctgaaattatcagagacatgccttttcctgcaaattccgatgtttggggagcattgcttggggcttgccgtatacatggaaatatcgaattagcacaatgggcagcagagcatttgtttgaattgaagccagagcattcaggctactatactcttatgataaacatgtatgctgagactgggagatggaatgaagcaaacaagatcaggaaattaatgaaatcgaggaaagtacagaaaaatccagcctatagctgggtacaggatcaggatggcaacaagttgcaagcttttcttgtgggggatgggtaa

SEQ ID NO: 124 - protein, 665 aa, Oryza sativa
MTAPFPLPSKPPPRLSLPPRIRASSCTPRLSGGGTLADVFTGKTLVAFYAACGKACDARRVFDEMPERDVVSWNSLVSAFLVNGMFHDARRALVSMMRSGFPLNVASLVSVVPACGTEQEEKFGLSIHALAVKVGLNTMVNLANALVDMYGKFGDVEASMQVFDGMLEQNEVSWNSAIGCFLNAGFYGDVLRMFRKMSEHNVMPGSITLSSLLPALVELGSFDLGREVHGYSIKRAMDLDIFVANSLVDMYAKFGSLEKASTIFEQMKDRNVVSWNAMIANLVQNGAETEAFRLVTDMQKSGECPNSITLVNVLPACARMASLKMGKQIHAWSIRRGLMFDLFISNALIDMYSKCGQLSLARNIFERSEKDDVSYNTLILGYSQSPWCFESLLLFKQMRSVGIDYDAVSFMGALSACTNLSVFKHGKEIHCVLVRRLLSGHPFLSNSLLDLYTKGGMLVTASKIFNKITKKDVASWNTMILGYGMHGQIDIAFELFELMKGDGLDYDHVSYIAVLAACSHGGLVDKGKKYFSQMVAQNIEPQQMHYACMVDLLGRAGQLSKCAEIIRDMPFPANSDVWGALLGACRIHGNIELAQWAAEHLFELKPEHSGYYTLMINMYAETGRWNEANKIRKLMKSRKVQKNPAYSWVQDQDGNKLQAFLVGDG

SEQ ID NO: 125 - DNA, 2352 bp, Oryza sativa
  misc_feature (141)..(141): s = guanine or cytosine
atggtggacgcggcggcggcggcggcggagttcggcgagctggacgggacggacgccatggcctacggcgacgaccggacgccgcgggacgggatggtgttcaagtcgtacgaggaggtgctcaacttctacaagcgctasgccttcggcaccgggttcggggtctgcgtcaagaagtcgtccttcaccaaggccggcctctgccgccgcctggtgctcgtctgcaacaagtggggggacgggaaggaggacgcgtgctaccaggcgaggccgacggccaagaccaactgccaggccaccgtcgtcgcgaggctctggagcgatggcctgctgcacctcatggatgtcaatctggagcacaaccacgcgctgaatccctccgcggcgcggttcctgaggtgctacaagacgttgcctagtgggatgagtaaagatctggtggtgagggctgccagaggggaatgctcgacctccggcgacatcgaggtcccgatattcgatgattgggggaggctcaagattggggaagatgatgtagcggccatcaatggctttttcgcggatatgcaggcgaagcaggcgaacttcttctatctcatggatttctacggggaaggccatctgaggagtgttttttgggccgattcgaggtccagggcagcgtaccaatatttcaacgacgctgtttggattgatacaacctgcttaagaaataggtttgatacaccccttgttttgttcctaggggtgaaccatcatggtgagcttgttctgttaggctgtggcttgttttcggatgagagtacggaaagcttcttatggctgctgaagtcgtggttgacttgtatgaaaggatggcctccgaatgccatagttacggatgattgtgccgcgataaaagccgcagttcgtgaagtatttccaaatgcacgccatcgaataagtgattggcatgtgttaagaagtatctctgaaaagttaggagaatcagcacaatttgaaggaatgaagaccgaattggaaactgtaatatatgattccttgaaggatgacgagtttgaggcaaggtggaataacttgatcagtagatttggccttcaggataatgaatggatcacttttctgtatgaaaatcgccatttctgggtccccgcctttctgaaagataccttctgggctgggttatctactgttaaccaccatgagagtccaaatgccttctttgaagattcaatcaacccagagaccaaattggtgacattccttagcagctatgtgaatcttttacagaacaaatacaaaatggaggaagatgatgatcttgagtcattgagtagaagcagggtgctagtatcgaagtttcctatggaagaacagctatctagactatacacctttaaaatgttcactaaactccagaatgagctgaacgcaaccatgaattgtgaagttcagttggatgattcaacatcctccattgtagttattgatctagctgagtcaagcggagaaatggtgaataaaaaatatgaagtcgttcactgtatggagaccgacaggatggaatgcaactgtggcctgttccagttcagtggcattgtttgtcggcatacattatcggtgcttaaatgtcagcatgtttttgatatacccccctgttatgtgcttaacaggtggcggaatgactttaagcagcttcacgccttagataatccatggaaggatttggtaacaagtaatcatattgagcgctatgattatgtttctttgcagtgcctccgtcttgttgagattggagcatcatcagatgagaagcatcagcatgcattaaaattaataagagacatacgacggacccttcttgatgataatttgtgccgggaattggagcagaaacttacaccatctgaacgtgctattaatggtgacagccacatgcaagctggctcatctgagggagggccagcaaaaaagcgccgtggccgtcctcccaaaaagagtaaagatacaaatgtggagtccgtgtcaaatcaatatgcccataaggattctttactggtatcatcggacgttagtcagaaggatgcttttcattcttcttctactgcctcaaatcttggtactcatgtcaggacaaatggtgttgttgaccttatggaagaagttaatccaaatgagctatcttttgatagccgttatggggtgcagtctagccacccacaccattatggcaatcagctgcatccaagcaacactatgcaggttttcatcagacatacagaaggaaagaactctttctcaagaaaacaaactcaagggaggcattcccctctggatgtagagcagatctaa

SEQ ID NO: 126 - protein, 783 aa, Oryza sativa
MVDAAAAAAEFGELDGTDAMAYGDDRTPRDGMVFKSYEEVLNFYKRYAFGTGFGVCVKKSSFTKAGLCRRLVLVCNKWGDGKEDACYQARPTAKTNCQATVVARLWSDGLLHLMDVNLEHNHALNPSAARFLRCYKTLPSGMSKDLVVRAARGECSTSGDIEVPIFDDWGRLKIGEDDVAAINGFFADMQAKQANFFYLMDFYGEGHLRSVFWADSRSRAAYQYFNDAVWIDTTCLRNRFDTPLVLFLGVNHHGELVLLGCGLFSDESTESFLWLLKSWLTCMKGWPPNAIVTDDCAAIKAAVREVFPNARHRISDWHVLRSISEKLGESAQFEGMKTELETVIYDSLKDDEFEARWNNLISRFGLQDNEWITFLYENRHFWVPAFLKDTFWAGLSTVNHHESPNAFFEDSINPETKLVTFLSSYVNLLQNKYKMEEDDDLESLSRSRVLVSKFPMEEQLSRLYTFKMFTKLQNELNATMNCEVQLDDSTSSIVVIDLAESSGEMVNKKYEVVHCMETDRMECNCGLFQFSGIVCRHTLSVLKCQHVFDIPPCYVLNRWRNDFKQLHALDNPWKDLVTSNHIERYDYVSLQCLRLVEIGASSDEKHQHALKLIRDIRRTLLDDNLCRELEQKLTPSERAINGDSHMQAGSSEGGPAKKRRGRPPKKSKDTNVESVSNQYAHKDSLLVSSDVSQKDAFHSSSTASNLGTHVRTNGVVDLMEEVNPNELSFDSRYGVQSSHPHHYGNQLHPSNTMQVFIRHTEGKNSFSRKQTQGRHSPLDVEQI

SEQ ID NO: 127 - DNA, 318 bp, Oryza sativa
atgcgccgagattgtattgaacgttttcgctcccatttcgccaccgaggaaggcaccagccaggcgtccgagcgctcagggcggagtatgaaatttacgcacccaaacaccgtcctcttcggatcggccagtgtgctcacgtccttcgtcgtcgcacatgccgtaaacaggacggcgaacagctcgaaagtcatcgcaagggaggcgaagtccgacagtgaagatggcgacgaagacaacagtctggttgtcactgggcgaagggacgatggcttcgcccccacaggtcgcctggccctccgtgagaacgccagatag

SEQ ID NO: 128 - protein, 105 aa, Oryza sativa
MRRDCIERFRSHFATEEGTSQASERSGRSMKFTHPNTVLFGSASVLTSFVVAHAVNRTANSSKVIAREAKSDSEDGDEDNSLVVTGRRDDGFAPTGRLALRENAR

SEQ ID NO: 129 - DNA, 779 bp, Oryza sativa
atggacaacaatagtggcaagggaggaagcacccatgcttcatggacgtcagctatgtcatctttcatgctgaaacaccttgccaatcttgtggccggtggcacaagtacctcatctggcttcaaggcagtgcatctcaatgcatgtgcgagggctgtgaataaaaggtttaacagtactctcacgggtgagcaaattaagaatcatttgaagacatggcaaagaaagtttacaaagataaataggcttaggaaaaggatcacaaggctgatgctgattattttaacaaacctcttgcgcactatggtgagatgcttacaatatttggtagcaccatggctacgggaaagtatgcaaaggactcaagttcagtcctaggaacagaggatgtccaagaggaaaatgatgaagaggaaaatgatggccctgccactactgatgatcgtccggaggcatcatctgcaagcaagccaaagaaagctagaacacaagaaattgaagatgatgggctgattggtgcattcaccagtgttggtgacaagttagcttctgctatactaaaggtcgctgagccagacaataaactgccagatggtttatttgaaaccttgaaaagccttcctgggtttgaggagatccacgtatctgtttactatgctcatttggttgctaaccctcacattgttagagcttttgatggacttcctttcgaaaacaagatacattgggtccatttgttcattaatgagaagtttcctggatcaatgtagcgttgttag

SEQ ID NO: 130 - protein, 74 aa, Oryza sativa
SGSLLSGSATFSIAEANLSPTLVNAPISPSSSISCVLAFFGLLADDASGRSSVVAGPSFSSSSFSSWTSSVPRT

SEQ ID NO: 131 - DNA, 1461 bp, Oryza sativa
  misc_feature (468)..(468): y = cytosine or thymine
  misc_feature (474)..(474): k = guanine or thymine
  misc_feature (660)..(660): r = adenine or guanine
  misc_feature (686)..(686): y = cytosine or thymine
  misc_feature (691)..(691): r = adenine or guanine
  misc_feature (696)..(696): r = adenine or guanine
  misc_feature (1252)..(1252): r = adenine or guanine
  misc_feature (1254)..(1254): r = adenine or guanine
  misc_feature (1291)..(1291): r = adenine or guanine
  misc_feature (1358)..(1358): y = cytosine or thymine
atggcgccctccttccggctctcttctgcacccgagtcggccgacgaagcaacagctcataataaggagatatacgaccaactccgacgagtcgcagagacctttccgtcggctcccagcctcatcggcctcccgtgcagtcgccacccggacgggtggtacacgttcacgaatggggttgtgagctccatggtgatcaaggagcacctgacggcgcgcgccaccgacatcttcctcaccaccttccccaagtccagcaccacttggctcaaggcgcttctgtactcgactctccaccgcggaactgacgagctggtggcgcacagcccgcaccagctcgtccctttcctcgagtcccaggtgttcgccaatgaccggatccctgacctgagctccttaccttcgccgcggttgtttatgacgcacatcccatcccagtcactgccagactccgtcgctgcatccggytgtaakgtggtgtacctttgtcgggaccccaaggactgcttcgtctcgctctggcacttttggaacaggttcatgccgtgggacatcgacgaggcgcaccggcaattctgcgatggcgtctcgcagtttgggccgttctgggagcatatcctcggctactggaggtggcacgtcgagaagccgaaccaggtrctcttcttgacctacgaggagctcgycgccracacrctcggccagttgagacgccttgccgagtttgtcggatgtccattcacgacggaggagcagaagcacggggtggataggaatatcgtggaggcctgcgcattggagaacatgtccggattagaggtgaatcggtcgggaacgatcaccatagtcgatagcactgtcccaaacaacacgttcttccggcgtggcgtggtcggagattggagaaaccacctgacgccagagatggcaaggaggattgatgagattacaaagagcaagtttaaagggactacacacacttcatggcttcctcctcaactgccgaagcggccgacggaacgtctcacatggaaatctatgaccaactccggcaagtcgtggagaccttcccggcggcagtcagcggtcatcggccaaccatactgtcgccaccctgacggatggtacatgtccaggcggggggttgtgagcgccatggccatcaagaggcatctgatggcgcgcaccacggacgtcttcatcgccaccttccccaagtccggcaccacatggctcaaggcgcttatattcrtrtcatggaacattgatgtggctgtccggcaattctgcratggcatctcgcatttcgggccgttttgggagcacgtcctcggctactggcggtggcacgtcgagaygccaagccaggtgttcttcttgacctacgaggagcttgcagctgacacgcttggcctattgagacgtttggccgagtttgttgggcacccgtttcacggttga

SEQ ID NO: 132 - protein, 486 aa, Oryza sativa
MAPSFRLSSAPESADEATAHNKEIYDQLRRVAETFPSAPSLIGLPCSRHPDGWYTFTNGVVSSMVIKEHLTARATDIFLTTFPKSSTTWLKALLYSTLHRGTDELVAHSPHQLVPFLESQVFANDRIPDLSSLPSPRLFMTHIPSQSLPDSVAASGCNVVYLCRDPKDCFVSLWHFWNRFMPWDIDEAHRQFCDGVSQFGPFWEHILGYWRWHVEKPNQVLFLTYEELGADTLGQLRRLAEFVGCPFTTEEQKHGVDRNIVEACALENMSGLEVNRSGTITIVDSTVPNNTFFRRGVVGDWRNHLTPEMARRIDEITKSKFKGTTHTSWLPPQLPKRPTERLTWKSMTNSGKSWRPSRRQSAVIGQPYCRHPDGWYMSRRGVVSAMAIKRHLMARTTDVFIATFPKSGTTWLKALIFVSWNIDVAVRQFCDGISHFGPFWEHVLGYWRWHVERPSQVFFLTYEELAADTLGLLRRLAEFVGHPFHG

SEQ ID NO: 133 - DNA, 1752 bp, Oryza sativa
  misc_feature (335)..(335): s = guanine or cytosine
  misc_feature (353)..(353): m = adenine or cytosine
  misc_feature (354)..(354): k = guanine or thymine
  misc_feature (355)..(355): y = cytosine or thymine
  misc_feature (432)..(432): s = guanine or cytosine
  misc_feature (829)..(829): y = cytosine or thymine
  misc_feature (834)..(834): m = adenine or cytosine
  misc_feature (839)..(839): y = cytosine or thymine
atggaggtgcgccgcagggcgccgctgccgccgccgcccgggagggtgcaggcgggcgacgcgctgccgctgccgatccggcacacgaacctgatattctcggcgctgttcgcggcgtcgctggcgtacctgatgcggcggtggcgggagaagatccggtcgtcgacgccgctccacgtggtggggctcgccgagatgctcgccatcttcggcctcgtcgcctcgctcatctacctcctcagcttcttcggcatcgccttcgtgcagtccatcgtctcctagcagcgacgacgaggaggaggacttccttgtcgggcccgccgtggctcctccgsggcggcggccgtcgcgcmkyattagccgccttcttctccggcgcagtgctcgctgctgggtagcccccacgacgatgccgcgcgggagagaatgccsgaggaggacgaggagatcgtgtcgtcggtcgttgccgggaaggtcccctcctacgtgctggagaccaagctcggggattgccgccgcgcagccggaatccggcgcgaggcggtccggcggatcaccgggaggcagatcgaggggctcccgctcgacggattcgactacgcctcgatcctcgggcagtgctgcgagctcccagtggggtacgtgcagctccccgtcggcatcgccgggccgctcctgctcgacggccagcggttctacgtccccatggccaccaccgaggggtgcctcgtcgccagcacgaaccgcggctgcaaggccatcgccgagtccggcggcgccgtcagcgtcgtcctccgcgacgggatgacgcgcgcccccgtcgcccgcytcccmaccgytcgccgcgccgccgagctcaaggccttcttggaggattctgtcaacttcaataccctctccatggtcttcaatagaggtccagtagattcgcgaggctgcaaggggtacaatgtgccatggctgggaggaacctgtacatgagattcagctgctgcacgggggatgccatggggatgaatatggtctccaagggcgtgcagaatgtgctggattacctccaagatgacttccctgacatggatgttattagcatctcagcaggtaacttttgctctgacaagaagccagctgctgtgaattggatcgaagggcgcggtaaatctgtggtttgtgaggcagtaatcaaggaggatgtagtcaaaaaggtgctgaagaccaatgtgcaatcgttggtagagctcaacgtgatcaagaatcttgctggttcagctgttgctggggctcttgggggtttcaatgcccatgctagcaatattgtaactgcaatcttcatagccactgggcaggatcctgcccagaatgtggaaagctctcactgcatcacaatgttggaagctgtaaatgatggcagagaccttcacatctccgttactatgccatcaattgagaggtgggcacagttgggggagggactcagctggcgtcacaggctgcttgcttggacctgctcggcgtgaaaggcgcgaacagggaatccccgggatcaaacgcgaggctcctggccaccgtggtggcaggtggtgtccttgccggggagctgtccctcctatctgcactcgccgcaggccagcttgtcaagagccacatgaaatacaacaggtccagcaaagacatgtccaaggtgatttcctagtcctagtagttcgaggtttggatcgttgcattggaaagaaagaaagaaaaaatggatag

SEQ ID NO: 134 - protein, 564 aa, Oryza sativa
  X_region (112)..(112): Xaa = any naturally occuring amino acid
  X_region (118)..(120): Xaa = any naturally occuring amino acid
  X_region (277)..(277): Xaa = any naturally occuring amino acid
  X_region (280)..(280): Xaa = any naturally occuring amino acid
  X_region (305)..(305): Xaa = any naturally occuring amino acid
  X_region (483)..(483): Xaa = any naturally occuring amino acid
MEVRRRAPLPPPPGRVQAGDALPLPIRHTNLIFSALFAASLAYLMRRWREKIRSSTPLHVVGLAEMLAIFGLVASLIYLLSFFGIAFVQSIVSSSDDEEEDFLVGPARGSSXAAAVAXXXPPSSPAQCSLLGSPHDDAARERMPEEDEEIVSSVVAGKVPSYVLETKLGDCRRAAGIRREAVRRITGRQIEGLPLDGFDYASILGQCCELPVGYVQLPVGIAGPLLLDGQRFYVPMATTEGCLVASTNRGCKAIAESGGAVSVVLRDGMTRAPVARXPTXRRAAELKAFLEDSVNFNTLSMVFNXRSSRFARLQGVQCAMAGRNLYMRFSCCTGDAMGMNMVSKGVQNVLDYLQDDFPDMDVISISAGNFCSDKKPAAVNWIEGRGKSVVCEAVIKEDVVKKVLKTNVQSLVELNVIKNLAGSAVAGALGGFNAHASNIVTAIFIATGQDPAQNVESSHCITMLEAVNDGRDLHISVTMPSIXEVGTVGGGTQLASQAACLDLLGVKGANRESPGSNARLLATVVAGGVLAGELSLLSALAAGQLVKSHMKYNRSSKDMSKVIS

SEQ ID NO: 135 - DNA, 865 bp, Oryza sativa
  misc_feature (135)..(135): r = adenine or guanine
atggcgaggctggtgacgcgcgcggcggcgtcgagcccgaagctcccgagcgggcggcggctgcgggtggcggtggtcggaggcggacccgcgggcggcgcggcggcggaggcgctggccaagggcggcttgaaracggtgctcatcgaacggaagctggacaactgcaagccctgcggcggggccatcccgctgtgcatggtgtcggagttcgacctgccgctggacctcgtcgacaggaaggtgaggaagatgaagatgatttcgccgtccaacgtcgccgtcgacatcggcggcacgctcgcgccgcacgagtacatcggcatggtccgccgcgaggtgctcgacgcctacctccgctcccgcgccgagggggccggcgccgaggtcgtcaatggtctcttcctgaggaggctcaccccatccccgagcacccgaggcctaagagctggtgggggacgcggcggggtacgtgacaaagtgctccggcgaggggatctacttcgcggcgaagagcgggcggatgtgcgcggaggcgatcgtggccgggtcggcgaacgggacgcggatggtggaggagagcgacctgcgcaggtacctggccgagttcgaccgcctctactggccgacgtacaaggtgctcgacgtgctccagaaggtgttctaccgctccaacgccgcccgcgaggcgttcgtcgagatgtgcgccgacgactacgtccagaggatgaccttcgacagctacctctacaagcgcgtcgtgccgggcaacccgctcgacgacatcaagctcgccgtcaacaccatcggcagcctcgtccgcgccaccgccctccgccgcgagatggagaaggtcaccttgtga

SEQ ID NO: 136 - protein, 287 aa, Oryza sativa
MARLVTRAAASSPKLPSGRRLRVAVVGGGPAGGAAAEALAKGGLKTVLIERKLDNCKPCGGAIPLCMVSEFDLPLDLVDRKVRKMKMISPSNVAVDIGGTLAPHEYIGMVRREVLDAYLRSRAEGAGAEVVNGLFLRRLTPSPSTRGLRLVGDAAGYVTKCSGEGIYFAAKSGRMCAEAIVAGSANGTRMVEESDLRRYLAEFDRLYWPTYKVLDVLQKVFYRSNAAREAFVEMCADDYVQRMTFDSYLYKRVVPGNPLDDIKLAVNTIGSLVRATALRREMEKVTL

SEQ ID NO: 137 - DNA, 360 bp, Oryza sativa
atggtaggcctacttgcctatgaccatcttcctacacctatctatcccttcctttcttctcctctcctcatctctgctcttcactttgtaccaaagcattcgagggacgacgttgtccctaggggcacagctggcaaactcctccccgaggcccactacagtcttaagatggagatatggagaggtagagaaggattcattgttgcgggagagatctggatgtttcaggacggtggccacatcgatataacgggctacgtccttccgctgttgcctagttgtgccgcttgcaagatcaacattcgcatgctttctatttgccttcatccttaccacaggaggagggccatctatatctag

SEQ ID NO: 138 - protein, 119 aa, Oryza sativa
MVGLLAYDHLPTPIYPFLSSPLLISALHFVPKHSRDDVVPRGTAGKLLPEAHYSLKMEIWRGREGFIVAGEIWMFQDGGHIDITGYVLPLLPSCAACKINIRMLSICLHPYHRRRAIYI

SEQ ID NO: 139 - DNA, 378 bp, Oryza sativa
  misc_feature (44)..(44): s = guanine or cytosine
  misc_feature (152)..(152): s = guanine or cytosine
  misc_feature (186)..(186): s = guanine or cytosine
  misc_feature (281)..(281): s = guanine or cytosine
  misc_feature (343)..(343): r = adenine or guanine
atgcctcgtcatcatcatcagcagcggcggcgccgcctcccgcsggcctcccgcaacgaatctgtggcggggagagggcggccggccgccggatccgtgcggggacggccgcgggccgcccgtcgtcacctgcccgcccgcgggctcccacsgtcgccgaggagggaagggaaggggaggagccasggccacctgtcgtcgctcgcccgcccgctggatctgcctcccgtgtgctcccgtcgctgccggggaggaagggaaggggaaaggaagggaaggasccgcgggccgcccgtcccgcctacgcctgctgccgccgagctcaccgtcgtcccacctgtgraggaggcagaagaagaagatgttccaagccgctag

SEQ ID NO: 140 - protein, 125 aa, Oryza sativa
MPRHHHQQRRRRLPPASRNESVAGRGRPAAGSVRGRPRAARRHLPARGLPPSPRREGKGRSHGHLSSLARPLDLPPVCSRRCRGGREGERKGRTRGPPVPPTPAAAELTVVPPVQEAEEEDVPSR

SEQ ID NO: 141 - DNA, 927 bp, Oryza sativa
atggtggttctcgctggcccgcccgccgtcgatcacatcccgctgctgaggtcgccggaccccggcgacgtcttctccggcgtgccggtcgtcgacctcggcagccccggcgcggcgagggccgtggtggacgcctgcgagcggtacgggttcttcaaggtcgtcaaccacggcgtggccacggacacgatggacaaggccgagtcggaggccgtcaggttcttctcccagacgcagcccgacaaggaccgctccggcccggcctacccgttcgggtacggcagcaagcggatcgggttcaatggcgacatggggtggctcgagtacctcctcagggccgctctgaacgagtacatctcgggggtgcggaaggtggcggtgcgggtgatggaggcgatgtcggaggggctgggcattgcgcaggcggacgcgctgagcgcgctggtgacggcggaagggagcgaccaggtgttccgcgtgaaccactacccgccgtgccgcgcgctgcaggggctcggctgcagcgtcaccggcttcggcgagcacaccgacccgcagctcgtctccgtgctccgctcaaacggcacgtccggcctgcagatcgcgctccgcgacggccagtgggtgtccgtgccctccgaccgcgactccttcttcgtcaacgtcggcgactcgttgcagcaggttctgaccaatgggaggttcaagagcgtgaagcacagggtggtggccaacagcctaaagtctagggtttccttcatctactttggagggccaccgttagcacagaggattgcaccattgccacagctgctgggggagggagagcagagcctgtacaaggagttcacatgggatgagtacaagaaggctgcctacaaatcaaggcttggagacaacaggctggcccagtttgagaagaagtag

SEQ ID NO: 142 - protein, 308 aa, Oryza sativa
MVVLAGPPAVDHIPLLRSPDPGDVFSGVPVVDLGSPGAARAVVDACERYGFFKVVNHGVATDTMDKAESEAVRFFSQTQPDKDRSGPAYPFGYGSKRIGFNGDMGWLEYLLRAALNEYISGVRKVAVRVMEAMSEGLGIAQADALSALVTAEGSDQVFRVNHYPPCRALQGLGCSVTGFGEHTDPQLVSVLRSNGTSGLQIALRDGQWVSVPSDRDSFFVNVGDSLQQVLTNGRFKSVKHRVVANSLKSRVSFIYFGGPPLAQRIAPLPQLLGEGEQSLYKEFTWDEYKKAAYKSRLGDNRLAQFEKK

SEQ ID NO: 143 - DNA, 2406 bp, Oryza sativa
atggtcgacggcgtcgtcgccgtcggcttcgtcggcggcgggggcactgcccgcctcgccgaccggatcctggacgcccatgtgttctcccctggtggctccgccaggaccctcgcgggcggagtcaggtaccaccgcgacggggagaagagggtggtgttcctgcacctcgctccgtcgccgccgacacctctggagggggcgggcgatctacgggagctgctcttcatgttctccgatgatatcactgatgctccaggtgctccgacaagtccggatgatacgaacgacacatcatcaaatcaagcttctaacactgatggcttgccaaaacctaacatgacttcaaaaggttctagttcagtggttatgcttgctaggccagcaatcagatctgatggtactttcagcaagaagctgcattcctctgtagaaggactgtttgaagactctttgacatccaaatcatcattggatgtttcttcgctggagaacaattgccatccagcaacccatgaagatgttcagttcatcaaggattttatatttcgacaatcagatgggctgagaggaagagggggacactcaagcaatacaactgctggtcctgtttctggtgttggaatggtggcagcagcagcagctgctgctgcagcatcagcagcatccgggaagcaaatgagtgctcctgatctccctactttcgatacatggatacttccagctgctaaggaggtgtatttgaaagatttgcctgccttttacccaaccagcatgcatgaagtacagctacagaaagctttacgatccttccactcaatggttaaaggaccggctgtccaagtattctccaagaagctaaaagatgaatgccaagcaatatgggaatctggaaggcagcaatgcgatgctgtcagtcttactggcagaccatgtaagcaccagagacacggtaaatcctctccatcagatgcagcgttacagcattctagtggatatgttttcctccatgcatgtgcctgtggccggtcacgccgtcttagggatgacccttttgattttgaggcagcgaacatgacctttaactgcttctctaattgtgaagatctgttacctactcttgtgcttccaagagagaccaatgctggtgcatttccagtatcctcttggcgtttggtgcggcttggaggagcaagatattacaaaccaacaaaaggattgctccaagcaggtttttgctccaaggaaaaatatcttttaaggtggacgatttctcttgggaaaggacaagggaaacatggcactcatgctaccaataaacctttctccacggcatctaatgcagatcctcaggctccccctattgttgctggagaagtaaaatcggccgtgacccaagtcacagcagaaattaaatctatgaaacttgaaaattctagaaaacaacctgaagtcgagtcaatgaacaattcaagtattaattttggtaaaggtcttccaaactttactatgaagaagccttttgctgaagttgttgctggccacacagcaagggattctgagtttcctgctctccaacagaagaggccattaaaacctggcaactggaaagatgagcggcaagtgagtggagcagaccaaactaatggccgtggtcatccagctcttagtcaaggacctatagctgacaatgaatctgagaaagtgagcagagataagagtaatggaagtgctggcggaaagccatttctacagatagggagcaatatagtgccaatggttgtcggaaaagagactaaagaagttaatcaatctatacagcagttcatggtatatgtcggatttgagcacgagtgttcctatggtcatcgtttcttactgtcagagaaacatctcaaggagattgattcgtcttatttgcagtttgaaagatctaatctaaataatgaagcagaaagcaaacatggttcacaaaagttgccccaaaatgcatctagattagcagcaacaatggatgtgaccagcggagggaagctcaataggccaatggattcatcagggagaaacagccagcagcaattgcttaagcccagggttgacgctgagaccttgcagccttctcactggctttcagatccacagaatgaaagaaagggagagctttctcttcattatgttacacttgatgatggtggagaagcattttcacttctaaacagaaatctgcccatatatatgcactgcccacattgcaagagctcagataggaagggaaatcaagatgcaaaggttgctgctgctgtgtcacaacttcaacggatttttattgctaatgacaagcatcacatagctatgaaaaagaacatgcacattttcgactttaggcatcgatgtgtctatgcgtag

SEQ ID NO: 144 - protein, 801 aa, Oryza sativa
MVDGVVAVGFVGGGGTARLADRILDAHVFSPGGSARTLAGGVRYHRDGEKRVVFLHLAPSPPTPLEGAGDLRELLFMFSDDITDAPGAPTSPDDTNDTSSNQASNTDGLPKPNMTSKGSSSVVMLARPAIRSDGTFSKKLHSSVEGLFEDSLTSKSSLDVSSLENNCHPATHEDVQFIKDFIFRQSDGLRGRGGHSSNTTAGPVSGVGMVAAAAAAAAASAASGKQMSAPDLPTFDTWILPAAKEVYLKDLPAFYPTSMHEVQLQKALRSFHSMVKGPAVQVFSKKLKDECQAIWESGRQQCDAVSLTGRPCKHQRHGKSSPSDAALQHSSGYVFLHACACGRSRRLRDDPFDFEAANMTFNCFSNCEDLLPTLVLPRETNAGAFPVSSWRLVRLGGARYYKPTKGLLQAGFCSKEKYLLRWTISLGKGQGKHGTHATNKPFSTASNADPQAPPIVAGEVKSAVTQVTAEIKSMKLENSRKQPEVESMNNSSINFGKGLPNFTMKKPFAEVVAGHTARDSEFPALQQKRPLKPGNWKDERQVSGADQTNGRGHPALSQGPIADNESEKVSRDKSNGSAGGKPFLQIGSNIVPMVVGKETKEVNQSIQQFMVYVGFEHECSYGHRFLLSEKHLKEIDSSYLQFERSNLNNEAESKHGSQKLPQNASRLAATMDVTSGGKLNRPMDSSGRNSQQQLLKPRVDAETLQPSHWLSDPQNERKGELSLHYVTLDDGGEAFSLLNRNLPIYMHCPHCKSSDRKGNQDAKVAAAVSQLQRIFIANDKHHIAMKKNMHIFDFRHRCVYA

SEQ ID NO: 145 - DNA, 4545 bp, Oryza sativa
  misc_feature (205)..(205): m = adenine or cytosine
  misc_feature (209)..(209): r = adenine or guanine
atgactgggtacgagaacgcggtggttacaaaccaagacgcctctacgtcgaaagatccacccgttgaaacggagaacggattgctgactacatctaagttcgtgaaggattctgatgcgaccaggccttgtccctccgacacaaaccgcaggccagcaaagatgacttccgaaactatcaggtcttggtgtcctattcataaamccargaaacatactcttcaagattgctgggtattcgtcaacgctcgtgctgagatccgcgcctgcaaagaacgtggaatccagcgtacttccccaactcggaacgtctattgtcccatccataagacaaagaatcacgacctctcgagttgcaaagttctacttggcgccataaaaactccgtctcctaagtcatacgtcccagtccgggataacggcaaggaacaaggagcgactttggccccagatcggttcattggggtaatcgatcttaatccccacgaaccatctgttttacatctcctcgaagattatgggtcatcgacatcagacgcggcgcgggaggtgttggctatcgatgacgttggcacgttagcacaagcaaacgcggagacggcggatcaatcgaccaccccagcccaacatatcagggctgttcaagccatattgagggaaacaccttacgatcctgtcctgaacaacgacctcgagcgttggacggaacgactacgggcatcggtggctaacctcagcaacgcgttcgaagaagccgccaccgcggcgcaacaaaaccgattacccatcagcgatgctaacggcgaaattccagaacatagagaatcacctcaacgagctacccccccacctcgtggcacgggtgaccttcgagatcaaatcaacgggcgccgagaagcacgacgcacacgggatgaagcaaatcgctctcggcaccatgtctcctcacgacgccatgatcgaggaagtcgcccacacgataaccgagaccacgatgatcatgatcggcgagggccagacaacactagtcacggccgtcgccgtaacgacgaagatggaggagatcggcgtcgagacaacaacgagagacgaagacaagattcccgagatccaggtcgtcaccctcgtaatcgcacgccggaaccaagtgacccatcgtcatcatcatcatcctctgcgtcctcttcattgtcagaccgacatccacgaaggtcacgcgaccaccgacaacccaccgctccgagcgctgggtgcagggctttcggtcgttccctacgtgatgtccgatggcctgagagatttcgacccggagctattgaaaagtatgatgggagcatcgacccagaagaattccttcaagtctactcgacagtgctttatgccgctggagcagatgacaacgcggtggcaaactatttaccaaccgcgttgaagggatctgcacgttcgtggctgatgcatctccccccctactcaatttcttcgtgggcagacctgtggcagcagtttgtcgccaacttccaaggaacatacaagcgccacgcgatcgaggacgatcttcacgcgttaacacagaactcaggtgaatctttgagggaatacgttcggcgctttaacgaatgcaggaataccatccccgaaatcaccgacgcttctgtaattcgcgccttcaagtctggcgtcagagatcgctacactacccaggagttggcaacaaggcatatcacaactactcgaaggttattccagatcgttgaaagatgcgcccacgtcgacgacgcactaagacgcaagaacgacaagccgaagactgggggagagaaaaagtcagccgcagacacatctgagtcgagcaagaagaaaaatcgcaaaaacgggaaaaggaaagctcaagcggaagttctcgcagcagagtacgcgaaccctcccaggcgcccggacccacaaggcagcgacacaaagaaatcatggtgccccatacacaaaacagacagacattctctggaggattgccttgttttcaaaaagtcgctcgagaagcacatggcgtttgagaaaggcaagcgagtacgcgttgtcgagaagaacgaggagtcgcctcctcacgaatcggactctgcgtacccagactccgacctccatgtttcgcacatcttggcggttccacgacatgaagtggtccgagcagaagatggagttctcggaagcagaccatcccaagaccgcggttatcccaggacgtatccgattgtggtcgaacctactattcggaacatcaaggtagcacgggtcctcattgacgggggcagctcgatcaaccttctttttgccagcactctggaggcaatgggaattccacaaagtgagttgacgccaactgatcaacctttccatgggattactccccaatcatcatccagacctttgggcaagattacgttgcctgtaacctttggccaagccaacaacttccgaacagagcaaatcacctttgatgtcgctgaattcgatacagcttacaacgccatcatcgggaggactgcacttgcgaagttcgtggccgcatcccactacgcatatcaagtactcaagatgccggggccgaaggggacaatcactattcaagggaacgcaaaactggcggtgcagtgcgacaagcgaagcctcgacatggtcgagcaaacgcccactccacccgccacgtctgagccacccaagaaagcctacgtcgacggcatcgttgtcaaaaccaagacaagcgactcattgattgatgacctccgggaaacgttcgacaacctccgacgatatcgtctcatgctcaatccagagaagtgtacgttcggagtaccgtcgggcaagctactcggattcctcgtttctggcagaggaatagaggcaaatcctgagaagatcaaagcaatcgagaacatgaagtcgcccacgagactcaaggaagtacagaagctaaccggatacatggcagcgttaagcagattcgttgccaggataggagaacaaggacaacctttcttcgccttgttgaagaaacaagacaaatttgtatggacgcaggaaaccaaagaggcatttattacactcaagcgctacctatcaaacccacctgtactcgttgctccccaacctaatgaagaattatttctttatattgccgctacgccacactccgttagcattgttattgtcgttgagcgagagaaagtacagcgaccagtctattacgtcagcgaagctctccatgacgcaaagacaagatatccacagattcaaaaactgctctacgcaatcatcatgacatcaaggaagctacgccactactttcaagcccacagagtcacaattgtttcctccttccctcttggcgaagtcgtgagaaacaaagacgttgtcggccgcattgcgaaatgggtagtcgagctaagccaatttgatgtccacttcatgccgcaaacagccattaaatctcaggtactcgccgatttcgtggccgattggaccatgccagataacaagtcagataaccaaggcgacaatgagacatggacaatggcgttcgatggcgcactcaatagccaaggagcaggggctggacttatcttaacatctccatccggagatcaattcaaacacgcaatccacctcaacttcagggcaaccaacaacactgcagaatacgaagggctactcgccgggatacgagccgcagccgcacttggggtcaagcgactaatcgtcaaaggggactctgagctagtcgcgaaccaggtgcacaaagactacaaatgctctaaccccgagttatccaagtaccttgcagaagtcaggaagctcgagaagaggttcgacgggatcgaggtccgacacgtctaccgcaaggataacgtcgagccagacgacctagcccgacgcgcatccagacgagaaccgctcgagcccgacacctttctcgacgtcctgacgaaaccctccgtaaaagaagtcagcggcgaagtcgtcccaagcacccccgacatcagctcagatgtcatcgaggtagaacgcgccgtggctgacattgaaacaacagatgactggcgcaccccgctaatcaaattcatcaacagcgaggagttacccgaaaatgacacagaggccgagaaaataacccgtaaagcaaaaatctactgtatgatcggcaacgatttatacaaaaaggtgccaaacgggatacttctcaagtgcgtctctatcgacgacggcagacaactcctcctcgacatacatgaaggcatatgcgggtcacacgccgtcggacggacattggtcggcaaagcctttcgacaaggatttttctggccaacagccctcaaagatgcatgcgacatggtccagcgatgtgaagcctgtcaatttcacagcaaacacacaaagctacctgcacaagcgcttcaaacaatccctctgacttggccgttctcgtgctgggggctagatatacttgggccattcccacgaggacagagcggctacaaattcctattgtag

SEQ ID NO: 146 - protein, 1514 aa, Oryza sativa
MTGYENAVVTNQDASTSKDPPVETENGLLTTSKFVKDSDATRPCPSDTNRRPAKMTSETIRSWCPIHKTTKHTLQDCWVFVNARAEIRACKERGIQRTSPTRNVYCPIHKTKNHDLSSCKVLLGAIKTPSPKSYVPVRDNGKEQGATLAPDRFIGVIDLNPHEPSVLHLLEDYGSSTSDAAREVLAIDDVGTLAQANAETADQSTTPAQHIRAVQAILRETPYDPVLNNDLERWTERLRASVANLSNAFEEAATAAQQNRLPISDANGEIPEHRESPQRATPPPRGTGDLRDQINGRREARRTRDEANRSRHHVSSRRHDRGSRPHDNRDHDDHDRRGPDNTSHGRRRNDEDGGDRRRDNNERRRQDSRDPGRHPRNRTPEPSDPSSSSSSSASSSLSDRHPRRSRDHRQPTAPSAGCRAFGRSLRDVRWPERFRPGAIEKYDGSIDPEEFLQVYSTVLYAAGADDNAVANYLPTALKGSARSWLMHLPPYSISSWADLWQQFVANFQGTYKRHAIEDDLHALTQNSGESLREYVRRFNECRNTIPEITDASVIRAFKSGVRDRYTTQELATRHITTTRRLFQIVERCAHVDDALRRKNDKPKTGGEKKSAADTSESSKKKNRKNGKRKAQAEVLAAEYANPPRRPDPQGSDTKKSWCPIHKTDRHSLEDCLVFKKSLEKHMAFEKGKRVRVVEKNEESPPHESDSAYPDSDLHVSHILAVPRHEVVRAEDGVLGSRPSQDRGYPRTYPIVVEPTIRNIKVARVLIDGGSSINLLFASTLEAMGIPQSELTPTDQPFHGITPQSSSRPLGKITLPVTFGQANNFRTEQITFDVAEFDTAYNAIIGRTALAKFVAASHYAYQVLKMPGPKGTITIQGNAKLAVQCDKRSLDMVEQTPTPPATSEPPKKAYVDGIVVKTKTSDSLIDDLRETFDNLRRYRLMLNPEKCTFGVPSGKLLGFLVSGRGIEANPEKIKAIENMKSPTRLKEVQKLTGYMAALSRFVARIGEQGQPFFALLKKQDKFVWTQETKEAFITLKRYLSNPPVLVAPQPNEELFLYIAATPHSVSIVIVVEREKVQRPVYYVSEALHDAKTRYPQIQKLLYAIIMTSRKLRHYFQAHRVTIVSSFPLGEVVRNKDVVGRIAKWVVELSQFDVHFMPQTAIKSQVLADFVADWTMPDNKSDNQGDNETWTMAFDGALNSQGAGAGLILTSPSGDQFKHAIHLNFRATNNTAEYEGLLAGIRAAAALGVKRLIVKGDSELVANQVHKDYKCSNPELSKYLAEVRKLEKRFDGIEVRHVYRKDNVEPDDLARRASRREPLEPDTFLDVLTKPSVKEVSGEVVPSTPDISSDVIEVERAVADIETTDDWRTPLIKFINSEELPENDTEAEKITRKAKIYCMIGNDLYKKVPNGILLKCVSIDDGRQLLLDIHEGICGSHAVGRTLVGKAFRQGFFWPTALKDACDMVQRCEACQFHSKHTKLPAQALQTIPLTWPFSCWGLDILGPFPRGQSGYKFLL

SEQ ID NO: 147 - DNA, 549 bp, Oryza sativa
atgaacaagggcaagattttcaagttggcaaagggatttagaggcagggcgaaaaattgcataaggatagcaagggagagggttgagaaagccttgcaatattcctacagggatagacataacaagaagagggatatgcgatccctttggatagagcgtatcaatgctggtacacgattgcatggggtatgtatccattgcactcaagctgtcaaaaaggaaatatcattggtagttgctaggaaagatctaatcatacgccgttccatcctgtgcttgagcctttcaaaacaaacaattcaagataacactactagacttacatcttggagtttaagtagctcttttcttgcatttgactaccaggtgaactatggaaatttcatgcatggattgatgaaggagaacatccagctcaaccggaaggtgctctcagagctttctatgcatgagccctacagcttcaaggcacttgttgatgtatcccgcagtgcatttccagggaacaggccgcctgttaaaaaggagggtctagcagccatcctgtga

SEQ ID NO: 148 - protein, 182 aa, Oryza sativa
MNKGKIFKLAKGFRGRAKNCIRIARERVEKALQYSYRDRHNKKRDMRSLWIERINAGTRLHGVCIHCTQAVKKEISLVVARKDLIIRRSILCLSLSKQTIQDNTTRLTSWSLSSSFLAFDYQVNYGNFMHGLMKENIQLNRKVLSELSMHEPYSFKALVDVSRSAFPGNRPPVKKEGLAAIL

SEQ ID NO: 149 - DNA, 1597 bp, Oryza sativa
  misc_feature (7)..(7): r = adenine or guanine
  misc_feature (10)..(10): m = adenine or cytosine
  misc_feature (32)..(32): s = guanine or cytosine
  misc_feature (37)..(37): s = guanine or cytosine
  misc_feature (44)..(44): n = any nucleotide
  misc_feature (72)..(72): s = guanine or cytosine
  misc_feature (75)..(75): s = guanine or cytosine
  misc_feature (102)..(102): s = guanine or cytosine
  misc_feature (106)..(106): r = adenine or guanine
  misc_feature (109)..(109): r = adenine or guanine
  misc_feature (110)..(110): k = guanine or thymine
  misc_feature (111)..(111): y = cytosine or thymine
  misc_feature (113)..(113): y = cytosine or thymine
  misc_feature (114)..(114): k = guanine or thymine
  misc_feature (116)..(116): y = cytosine or thymine
  misc_feature (119)..(119): r = adenine or guanine
  misc_feature (120)..(120): w = adenine or thymine
  misc_feature (121)..(121): k = guanine or thymine
  misc_feature (122)..(122): r = adenine or guanine
  misc_feature (123)..(123): w = adenine or thymine
  misc_feature (124)..(124): b = cytosine, guanine, or thymine
  misc_feature (126)..(126): m = adenine or cytosine
  misc_feature (137)..(137): s = guanine or cytosine
  misc_feature (138)..(138): r = adenine or guanine
  misc_feature (1375)..(1375): y = cytosine or thymine
  misc_feature (1433)..(1433): y = cytosine or thymine
atgccaraamaactaagaacggccccggggcsctttsccgcccnaaaacccggcgggttctcggcgccggcsgcsgcccttcccaaggttccccccggcggscgargcrkycykgyttrwkrwbcmgtgcaacgccsrcttgaggcgcaggcccaggcgcaggcggtggccaaggccgccagcgtcgccgcgctcgagcagttcaagatctccgccgaccggtacatgaaggaaagaagtagcatagcggtaataggcctcagtgtacacactgcaccagtggagatgcgtgagaaacttgctgttgcagaggaactatggccccgtgctatctcagaactcaccagtctgaatcatattgaagaggctgctgttcttagtacctgcaatagaatggaaatctatgtggtagctttatcgtggaaccgtgggattagagaagtggtagactggatgtcaaagagaaaagtggaatccctgcttctgagctcagggagcatctattcatgttgcgtgacagtgatgccacacgccatctgtttgaggtatctgctgggcttgactctttggttcttggagaagggcaaatccttgctcaagttaaacaagttgtcagaagtgggcaaaacagtggaggcttgggaaagaacatcgataggatgttcaaggatgcaatcactgctggaaagcgtgtccgctgcgagactaacatatcatcaggtgctgtctctgtcagttcagctgcagttgaattggccttgatgaagcttccaaagtcggaatgcctatctgctaggatgctgttgattggtgctggcaagatgggaaagttggtggttaaacatttgattgccaagggatgcaagaaagttgttgtggtgaaccgttcagtggaaagggtggatgccatccgcgaagagatgaaagacattgagattgtgtacaggcctcttacagagatgtatgaagccgctgccgaagctgatgtcgtgttcacaagcacggcatccgaaaccccattgttcacaaaggagcacgcagaggcgcttcccgctatttctgatgctatgggtggtgttcgactctttgtcgacatatccgtccccagaaatgtcagcgcctgtgtgtctgaagttggccatgcgcgagtatacaacgtcgatgacttgaaagaggttgtggaagccaacaaggaggaccggcttaggaaagcaatggaggcccaaacaatcatcacccaagaattgaaacggttcgaggcatggaggactcgctggagactgttccgactatcaagaagctgaggtcctacgccgacaggatcagggcttcggagcttgagaagtgcctccagaagatcggcgaagacgccctyaccaagaagatgagaagatccatcgaggagctcagcaccggcatcgtgaacaagcttytccacggcccattgcagcacctgagatgtgacggcagcgacagccgcaccctcgatgagacgctggagaacatgcacgccctcaacaggatgttcagcctcgacaccgagaaggcgatcattgagcagaagatcaaggcgaaggtggagaagtcccagaactga

SEQ ID NO: 150 - protein, 531 aa, Oryza sativa
  X_region (3)..(4): Xaa = any naturally occuring amino acid
  X_region (11)..(11): Xaa = any naturally occuring amino acid
  X_region (13)..(13): Xaa = any naturally occuring amino acid
  X_region (15)..(15): Xaa = any naturally occuring amino acid
  X_region (36)..(42): Xaa = any naturally occuring amino acid
  X_region (46)..(46): Xaa = any naturally occuring amino acid
  X_region (478)..(478): Xaa = any naturally occuring amino acid
MPXXLRTAPGXFXAXKPGGFSAPAAALPKVPPGGRXXXXXXXVQRXLEAQAQAQAVAKAASVAALEQFKISADRYMKERSSIAVIGLSVHTAPVEMREKLAVAEELWPRAISELTSLNHIEEAAVLSTCNRMEIYVVALSWNRGIREVVDWMSKKSGIPASELREHLFMLRDSDATRHLFEVSAGLDSLVLGEGQILAQVKQVVRSGQNSGGLGKNIDRMFKDAITAGKRVRCETNISSGAVSVSSAAVELALMKLPKSECLSARMLLIGAGKMGKLVVKHLIAKGCKKVVVVNRSVERVDAIREEMKDIEIVYRPLTEMYEAAAEADVVFTSTASETPLFTKEHAEALPAISDAMGGVRLFVDISVPRNVSACVSEVGHARVYNVDDLKEVVEANKEDRLRKAMEAQTIITQELKRFEAWRDSLETVPTIKKLRSYADRIRASELEKCLQKIGEDALTKKMRRSIEELSTGIVNKLXHGPLQHLRCDGSDSRTLDETLENMHALNRMFSLDTEKAIIEQKIKAKVEKSQN

SEQ ID NO: 151 - DNA, 1788 bp, Oryza sativa
  misc_feature (16)..(16): r = adenine or guanine
  misc_feature (44)..(44): k = guanine or thymine
  misc_feature (102)..(102): k = guanine or thymine
  misc_feature (112)..(112): r = adenine or guanine
  misc_feature (120)..(120): s = guanine or cytosine
  misc_feature (167)..(167): r = adenine or guanine
atgcgcgaacgtgcartggtggtggtgcatcgacgatggagatkagcggcgccggagcgggaggcgtgccgacaaagctggagcacgacgacgctgcggctkttggcggcgragcgggasccgtgcggcggcggcgcgccgaggagggaggagaaggagcggtggcracgggtgctggtcgtcggctgcctggtggcgctgctcctcttcgcgttcttcgtcctcgggcgggagagcgcgtcggaggttctgcagatcgcgagctccaagctgtccgcgatgaacggagggtttacgacgaaaaacccttctcatggcggtggcgccgccaagcatgccgacgagctcctcggcgggctgctggcgccgggcatggaccggcggtcgtgccggagccggtaccaggcggcgcattactacaagcacttcccctacgcgccgtcgccgcacctcctggacaagctgcgcgcctacgaggctcggcaccggaggtgcgcgccggggacgccgctgtacaaccgctccgtcgagcagctccggtccggccgcagcgccggcggcgtggagtgcaactacgtcgtctggctccccttcgacggcctcggcaaccgcatgctgtccatggtgagcggcttcctctacgcgctcctcaccgaccgcgtcctcctcgtcgacctgccccatgactcctccgacctcttctgcgagcccttccccggcgcgacatggctgctcccgccggacttccccgtcgccaacctcttcggcctcgggccgaggcccgagcagtcgtacacgaccctcctgaacaagaagaagatcaccgccgtcgtcaacaacgacgacgacccggcatcaaagaacgccacggccgcgctgccgccgccgccggcgtacgtgtacctgagcctagggtaccagatggcggacaagctcttcttctgcggcgacgaccagcgcgcgctcgccaaggtgaactggctgctgctgtacagcgacctctacttcgtcccgtcgctctactccgtcgccgagttcaacggcgagctccggcggctgttcccggcgaaggagagcgcgtgccacctcctcgcccgctacctcctccacccgaccaacgccgtgtggggcatggtgacacgctactacaactcctacctagcccaggcaagccgccgcatcggcgtccagatcaggatatcctcacctgcttcccgccaagaacacgttcttaccgggaaaccaccaccggacaacgacaacgacgacgatcttgccacggcgtacgacagcaacagcagcaatggcagcggtggcggcaactactcggccatcctgatcgcgtcgctgtacccggactactacgagaggatccgggcgacgtactacgagcacgcgacgaggggaagggtgagggtgggggtgttccagccgacgcacgaggagaggcaggcgacgcagaggctgttccacaaccagaaggcgctggcggagatcctcctgctggggttctccgacgagctcgtcacgtccgggatgtcgacgttcgggtacgtgggcagcagcctcgcgggcgtgcggccgacgatcctgatgcccgcgcacggccacagggtccccgcgccgccgtgccggcgagccgtgtccatggagccgtgcaacctcacgccgccgcgggtgggcgaggcggagtgccgggagatggccgccgtcgtcgacaaggaggacgtggcccggcacgtcaaggtctgcgaggactttgatagaggggtgaagtttttcgattga

SEQ ID NO: 152 - protein, 595 aa, Oryza sativa
MRERALVVVHRRWRSAAPEREACRQSWSTTTLRLLAAQRDPCGGGAPRREEKERWPRVLVVGCLVALLLFAFFVLGRESASEVLQIASSKLSAMNGGFTTKNPSHGGGAAKHADELLGGLLAPGMDRRSCRSRYQAAHYYKHFPYAPSPHLLDKLRAYEARHRRCAPGTPLYNRSVEQLRSGRSAGGVECNYVVWLPFDGLGNRMLSMVSGFLYALLTDRVLLVDLPHDSSDLFCEPFPGATWLLPPDFPVANLFGLGPRPEQSYTTLLNKKKITAVVNNDDDPASKNATAALPPPPAYVYLSLGYQMADKLFFCGDDQRALAKVNWLLLYSDLYFVPSLYSVAEFNGELRRLFPAKESACHLLARYLLHPTNAVWGMVTRYYNSYLAQASRRIGVQIRISSPASRQEHVLTGKPPPDNDNDDDLATAYDSNSSNGSGGGNYSAILIASLYPDYYERIRATYYEHATRGRVRVGVFQPTHEERQATQRLFHNQKALAEILLLGFSDELVTSGMSTFGYVGSSLAGVRPTILMPAHGHRVPAPPCRRAVSMEPCNLTPPRVGEAECREMAAVVDKEDVARHVKVCEDFDRGVKFFD

SEQ ID NO: 153 - DNA, 360 bp, Oryza sativa
atgacggttgcggccggccaaatccagtcgatgaagaaaacccaagtcgatcggatccaagctagatctgaacgaccaatggagagacgacaacaacatgcatgtggagatggaacaaatgaagctcgcaactcgcaggcctggcttaggagcgctttttgcacaaaaaaaatacccgtgcattgcaacagcgcaaggacggccgacggcgacggcgagggcccggtggtgcgggtaaccaaccggcggtgccgacagctactagctagccgcgcgatcgggcgacggccgccgcacatgtcgactggctgcagcctgcgggttgttttggcatttcgtcgaacagtcaccgtgcagtaa

SEQ ID NO: 154 - protein, 119 aa, Oryza sativa
MTVAAGQIQSMKKTQVDRIQARSERPMERRQQHACGDGTNEARNSQAWLRSAFCTKKIPVHCNSARTADGDGEGPVVRVTNRRCRQLLASRAIGRRPPHMSTGCSLRVVLAFRRTVTVQ

SEQ ID NO: 155 - DNA, 1388 bp, Oryza sativa
atggtgttggtggcgattggggtggttgtggcggcggcggtggtggtgagcagcctgctgctgcggtggaacgaggtgcggtacagccggaagcgcggcctgccgccggggacaatggggtggccgctcttcggcgagaccaccgagttcctcaagcagggacccagtttcatgaaggcccggaggctcagaggtacgggagcgtgttcaggacgcaaatcctggggtgcccgacggtggtgtgtatggaggcggagctgaaccggcgggcgctggccagcgaagggcgcgggttcgtcccgggctacccgcagtcgatgctggacatcctggggcggaacaacatcgccgccgtgcagggccccctccaccgcgccatgcgcggcgccatgctctccctcgtccgccccgccatgatccgctcctccctcctccccaagatcgacgccttcatgcgctcccacctcgccgcctggtcctcctcctcctcctccgccgtcgtcgacatccaggccaagaccaaggagatggccttgctatctgcactcaggcagattgccggcgtctccgctggcccactctctgacgctctcaaggcagagctctacacccttgtgcttggcaccatctccctgcccatcaaccttcctggaaccaactactaccaaggcttcaagtttcaggcaaggaagaagcttgttgcaatgctagagcagatgatcgcggaacggcgatcctccggtcaggtacacgacgacatgctggatgcgctcttgaccggtgtcgagggcaccagggagaagctcacagatgagcagatcattgacctgatcatcacccttatatactctggatatgaaaccatgtcgacgacctcgatgatggctgtcaactgcagaaagaacattttgatatcaggaaaggtaaagcgcccgaagatgccatcgactggaatgatttcaagtccatgaccttcactcgagcttttactatgcaggttatcttcgagacattaagattagctacagttgtgaatgggctgctgaggaaaactacccaagatgttgaaatgaatggggtatgttatcccaaaaggttggagaatatatgtttacacaagggaaataaattatgatccattcctgtaccctgatcccatgacattcaatccatggaggtggctgtttggaggaggtagtcgaatgtgcccggggaaggaagtaggcaccgtagaaattgcaacattccttcactatttcgtgactcaatacagcagatgggaggaagaaggtaacaacacaatattgaagttcccccgagttgaagctcccaacgggttacatatccgcgttcaagattactgatcctggaacattttgcgaagttag

SEQ ID NO: 156 - protein, 453 aa, Oryza sativa
MVLVAIGVVVAAAVVVSSLLLRWNEVRYSRKRGLPPGTMGWPLFGETTEFLKQGPSFMKARRLRYGSVFRTQILGCPTVVCMEAELNRRALASEGRGFVPGYPQSMLDILGRNNIAAVQGPLHRAMRGAMLSLVRPAMIRSSLLPKIDAFMRSHLAAWSSSSSSAVVDIQAKTKEMALLSALRQIAGVSAGPLSDALKAELYTLVLGTISLPINLPGTNYYQGFKFQARKKLVAMLEQMIAERRSSGQVHDDMLDALLTGVEGTREKLTDEQIIDLIITLIYSGYETMSTTSMMAVNCRKNILISGKVKRPEDAIDWNDFKSMTFTRAFTMQVIFETLRLATVVNGLLRKTTQDVEMNGYVIPKGWRIYVYTREINYDPFLYPDPMTFNPWRWLFGGGSRMCPGKEVGTVEIATFLHYFVTQYSRWEEEGNNTILKFPRVEAPNGLHIRVQDY

SEQ ID NO: 157 - DNA, 555 bp, Oryza sativa
atggcaccgcgcgcaccggtcaaaaggaataaaacgcgcgcaagagagacagagatgccaccaccaccaccaccgtgcgtgcgtagaatagctgcctacaggtggcgcgtctggcatggccatgcgtgcagcctccttctgctgaaatttcttctgtactctactgtactgtactactcctgcgctgcgacgcacggcacggtggtgtggtggtgcatggggatgggacgacggatcgaggagcacacacacgagcacaacactgcacacggcttcagaccagtgggagcaaatcatggacgccggctgggaggactggggtcgtctggggatggccaaccttgcagacttgcacgcaggcccggccacacatcacgcgcccgcctctactgtcgtgctcctcctgccactacggggagccgccgccttcaacgcacaggacgctcaccggcctctgccgccatgcgcctgggagaaagagaggagagagtttccgggagagaggagtttgagagagagaggaggagaggaggagaggagataaggaggagataa

SEQ ID NO: 158 - protein, 184 aa, Oryza sativa
MAPRAPVKRNKTRARETEMPPPPPPCVRRIAAYRWRVWHGHACSLLLLKFLLYSTVLYYSCAATHGTVVWWCMGMGRRIEEHTHEHNTAHGFRPVGANHGRRLGGLGSSGDGQPCRLARRPGHTSRARLYCRAPPATTGSRRLQRTGRSPASAAMRLGEREERVSGREEFERERRRGGEEIRRR

SEQ ID NO: 159 - DNA, 1044 bp, Oryza sativa
atggcgacaacgacgacgtccaccgtcacgaccatcgcggcgcaggcttatcacgtactgaagatcaacgggtactccaacaccttgaaagccggccgccaccaccccctcagctcctgtccgttcagcgcaggaggccacacctggcatgtcagctactacccacacggatgccgcgacagcaacaaggactgcatctccatcttcctcgtgcttgaggacatcgtcaccgacgaggacgtgatggcaaaagctacatttcagcctgctcgatcgatacgggaacccggtgccctcgtacacctatcacaccaaattacggcaagggggttcgaaaactttattaggagggacgaattagagcgatcggaatatctcaatgatgactactttgccgttgctgcccatgtaatcatcccaaagaaaaagccatctgtcgtcgtaccaccgtcgaacatgcatctgtattttggtgatctcctcgtaagcaaagaaggcaccgatgtcaagttcctggtcggcggcgagatgtttgcggcgcaccggttggtgctggcggcacggtcaccggtcttcaaggcagagcttttcgggccgacgaagaaaggcaccatagatgcgatacagattgacaatatggaagcacgagtgttcaaggctctgcttgagttcatctacacagacatttggtcagagataggtcatggaaaagacaatgtagctatggctcaacagttgcttgctgctgcagacaggtatggcttacagaggttaaagtttgtctacgaagataagttgtgcaaccatattgatacatgctcagtgtcaaccatgttggtgctagcggagaagcaccattgttgcaaactcaaggaggcatgctctacgttccttagtttcatgagccctcctattgttgaagatctaaattccagcatatttggcagtgaattggagaagacggtttcttcttcagagaaccatggaagtcaaattaaccgtacagatattaggattcaaccgtggcaaaatgcagatgtctag

SEQ ID NO: 160 - protein, 347 aa, Oryza sativa
MATTTTSTVTTIAAQAYHVLKINGYSNTLKAGRHHPLSSCPFSAGGHTWHVSYYPHGCRDSNKDCISIFLVLEDIVTDEDVMAKATFQPARSIREPGALVHLSHQITARGFENFIRRDELERSEYLNDDYFAVAAHVIIPKKKPSVVVPPSNMHLYFGDLLVSKEGTDVKFLVGGEMFAAHRLVLAARSPVFKAELFGPTKKGTIDAIQIDNMEARVFKALLEFIYTDIWSEIGHGKDNVAMAQQLLAAADRYGLQRLKFVYEDKLCNHIDTCSVSTMLVLAEKHHCCKLKEACSTFLSFMSPPIVEDLNSSIFGSELEKTVSSSENHGSQINRTDIRIQPWQNADV

SEQ ID NO: 161 - DNA, 714 bp, Oryza sativa
atggccaccgcctcctcactcttcctcgcctcccccgtcgccaccgcgccgacagcccgcgcccggtccacaccctcggcttcccctgcccggccgtccctgcgcctccggcggccgtcaacgttggccgcggccgcggtccaggccgagcaccagcccgcggtcgccgcggcgccgaagccgccggcactcccgttccgcgtcggccacggcttcgacctccaccgcctcgagccgggcctccccctcatcatcgggggcatcgacatcccccacgaccgcggctgcgacgcccactccgacgggggacgtgctgctgcactgcgtggtggacgcgattctcggcgcgctcgggctgcctgacatcgggcagatcttcccggaactccggacccccgttggaagggcgccgattcgtcggtgttcatgagggaagctgtgaaactgatgcatgaagctggctatgagctggggaacctagacgctacattgatcttgcagaaacccaaaattagcccattcaaggagacaatacggtctaacttgtgtgacttgctgggggcggatccatccgtcgtcaatctgaaggccaagacgcacgagaaagtcgacagtcttggtgaaaacaggagcatagctgctcacactgtagttcttctgatgcggaaataggaaaatggaagtgtactacatattacaggaattgaattgtaa

SEQ ID NO: 162 - protein, 223 aa, Oryza sativa
MATASSLFLASPVATAPTARARSTPSASPARPSLRLRRPSTLAAAAVQAEHQPAVAAAPKPPALPFRVGHGFDLHRLEPGLPLIIGGIDIPHDRGCDAHSDGDVLLHCVVDAILGALGLPDIGQIFPELPDPRWKGADSSVFMREAVKLMHEAGYELGNLDATLILQKPKISPFKETIRSNLCDLLGADPSVVNLKAKTHEKVDSLGENRSIAAHTVVLLMRK

SEQ ID NO: 163 - DNA, 531 bp, Oryza sativa
atggtgagggagtcgagctctccagctgttcacaagaaggcagtggtggcagttgcggatagagaggatgggggctggggcactgcaacggtggtggtagaacttgagcttgagcggtggtgccatcgtcatgccttagttcttgtcccaagctgtttgcgctacccaactcgcccttctcctctcttctctctttatttctcccctctccattctacggtagcgtcgatggcgtggagagaccgatgggaggaaggatggattggggcgatggtgagccactcatcgctggcaccgatagcaacctcgcattcatatcacaacctcctagctctcgatctatgcggtcctaagagatgttgcatggaggaaggagcgccacgaccatggctaggaggggctcctgagggcgcagggccgtggataagcagagtggaggaacgttgccaagggcaccagccaatgccaccactaatgttgccaatgtcagaggataatgaggaaaagagaagagggatggaggggggatag

SEQ ID NO: 164 - protein, 176 aa, Oryza sativa
MVRESSSPAVHKKAVVAVADREDGGWGTATVVVELELERWCHRHALVLVPSCLRYPTRPSPLFSLYFSPLHSTVASMAWRDRWEEGWIGAMVSHSSLAPIATSHSYHNLLALDLCGPKRCCMEEGAPRPWLGGAPEGAGPWISRVEERCQGHQPMPPLMLPMSEDNEEKRRGMEGG

SEQ ID NO: 165 - DNA, 1188 bp, Oryza sativa
atggtgacagatgtatgtgttgttggggttgcacgcacccctatgggtggtttcctaggtgccctgtcttccttgtcagctaccaaacttggttccatagcaattgaaggctgctctgaagagggcaaatgttgatccagcccttgtgcaagaggtcttctttggtaatgtgttgagtgctaatttggggcaagctcctgcaagacaagctgctttaggtgcagggataccaaacacagttgtttgcagcgcagttaacaaagtttgcgcatctggcatgaaaggcgacaatgtttgcagcacagtcaattctattgggcatcaatgatattgttgtagccggtggcatggaaagcatgtctaatgctccaaaatacattgctgaagctagagaaaaggatctcgttttggacatgacactcttgttgatggcatgcttaaagatggcctttgggatgtatacggtgattttgccatgggaaattgtgctgagctttgtgctgacaatcatgctctgacaagggaagaccaggatgcctatgctattcaaagcaatgagcgtggaattgctgctcggaacagtggtgcttttgcatgggagattgttccggaagttcctgttgggagagggaaaccaccggtacttgttgacaaagatgagggcctggacaagtttgacccagtgaaactgaagaagctccgtcctagtttcaaggagaatggtggtactgttactgctgggaatgcttctagtataagagtgacggtgctgccgcattagtattggtgagtgggcagaaggcacaagaacttggactgcaagttattgcacgaatcaaaggatttgcagatgcagctcaacaggctcctgaattatttaccactagcccggcacttgccatacctaaggctcttgctaatgctggcttggagtcttctcgtgttgattactatgaaattaatgaagccttttcagtagttgcacttgcaaatcaaaagcttcttggaattccttcagaaaaaattaatgtacatggaggagctgtgtctttaggacatcctcttggatgcagtggtgctcgaattttggtcaccctgcttggtggcaaaatcggagttgctggtgtttgcaatggcggaggcggagcatctgctctcgttctcgagcttgcataagaagccttgtaa

SEQ ID NO: 166 - protein, 392 aa, Oryza sativa
  X_region (128)..(128): Xaa = any naturally occuring amino acid
  X_region (130)..(130): Xaa = any naturally occuring amino acid
  X_region (209)..(209): Xaa = any naturally occuring amino acid
  X_region (254)..(254): Xaa = any naturally occuring amino acid
MVTDVCVVGVARTPMGGFLGALSSLSATKLGSIAIEGALKRANVDPALVQEVFFGNVLSANLGQAPARQAALGAGIPNTVVCSAVNKVCASGMKATMFAAQSILLGINDIVVAGGMESMSNAPKYIAXSXRKGSRFGHDTLVDGMLKDGLWDVYGDFAMGNCAELCADNHALTREDQDAYAIQSNERGIAARNSGAFAWEIVPEVPVGXRGKPPVLVDKDEGLDKFDPVKLKKLRPSFKENGGTVTAGNASSIXSDGAAALVLVSGQKAQELGLQVIARIKGFADAAQQAPELFTTSPALAIPKALANAGLESSRVDYYEINEAFSVVALANQKLLGIPSEKINVHGGAVSLGHPLGCSGARILVTLLGGKIGVAGVCNGGGGASALVLELA

SEQ ID NO: 167 - DNA, 1233 bp, Oryza sativa
  misc_feature (279)..(279): r = adenine or guanine
  misc_feature (284)..(284): y = cytosine or thymine
  misc_feature (293)..(293): y = cytosine or thymine
  misc_feature (305)..(305): r = adenine or guanine
  misc_feature (306)..(306): k = guanine or thymine
  misc_feature (333)..(333): k = guanine or thymine
  misc_feature (424)..(424): y = cytosine or thymine
  misc_feature (475)..(475): s = guanine or cytosine
  misc_feature (934)..(934): y = cytosine or thymine
  misc_feature (936)..(936): r = adenine or guanine
  misc_feature (950)..(950): r = adenine or guanine
  misc_feature (1036)..(1036): r = adenine or guanine
  misc_feature (1066)..(1066): y = cytosine or thymine
  misc_feature (1078)..(1078): r = adenine or guanine
  misc_feature (1094)..(1094): y = cytosine or thymine
  misc_feature (1138)..(1138): s = guanine or cytosine
  misc_feature (1140)..(1140): m = adenine or cytosine
  misc_feature (1181)..(1181): k = guanine or thymine
  misc_feature (1182)..(1182): y = cytosine or thymine
atgcctccccgcacttgccatggtcgtcgtgcgcccactccggatcccgtgagtgagcctaaggaatcgagcggagaggattacgctcacaatgatgaagaggttgaggcaaatgttgagggggctagtgaggtggcaagtggagatgatgtcagtcgtagtggggaggatgaggatgaagaaagtgatgatatgcactttgatcccttcatccagtttgtggtgaacatgaggaatccagtacagtataccatcttgaggcatcatgatcagttcttraggcytcgggacaytccggatccccrktttcacaccgctttccagaagactgtktatgagcaggtttatgcagggaaagcatttgcagagcataagtggatttcttggagagacatcaatgagactccagagtttgagagcttgyatgatctcttcaagactgttggcattgaccggattgtgaccctcaagcaasactacaatgaagatttgatccggcagttctatgctacagtgtgggtggctggagactataatgatttgcatgaggagcacacttacaatccgctctccatagactatctctctcagttctatgaagatggagtgcggtacacacatgggaaggttgccggcttgaggactatccccagtgtggttaatagtattgtgagagctactatcctccctcgccttggcaacaatgatgacattaggggggtggcttggcacgtcatcgatgcaatcattcagggacgtcagttcgacattgtgtctctcatgatgcaagatattgctatcaccaaggggacattcactcagggaatctattatgccccttacatcatgaggttgattcaagacaagcttggggctgctggctcagcacctcctcctcctcatgggtatgatccaaatgctttcttccatccayartatgcttactttgraatgcaacccaatgaatacttctacccggtacttggggctattaataccctaagtgaaagcattcaacgcttgtctaccgggcatraagcattgcatgaggatgttcgtggcttgygcaccgatgttrgagacttgaatgcttycgtgggaagattgcacactagagtgggtgcattggattctcgastmcaaatgttggagagcacccaagcttttgtatatcatcgtckycagctcgtcctccttctcctccataagaatgaagacctttttggtacttga

SEQ ID NO: 168 - protein, 410 aa, Oryza sativa
MPPRTCHGRRAPTPDPVSEPKESSGEDYAHNDEEVEANVEGASEVASGDDVSRSGEDEDEESDDMHFDPFIQFVVNMRNPVQYTILRHHDQFFRPRDTPDPPFHTAFQKTVYEQVYAGKAFAEHKWISWRDINETPEFESLHDLFKTVGIDRIVTLKQHYNEDLIRQFYATVWVAGDYNDLHEEHTYNPLSIDYLSQFYEDGVRYTHGKVAGLRTIPSVVNSIVRATILPRLGNNDDIRGVAWHVIDAIIQGRQFDIVSLMMQDIAITKGTFTQGIYYAPYIMRLIQDKLGAAGSAPPPPHGYDPNAFFHPHYAYFAMQPNEYFYPVLGAINTLSESIQRLSTGHQALHEDVRGLRTDVRDLNASVGRLHTRVGALDSRLQMLESTQAFVYHRPQLVLLLLHKNEDLFGT

SEQ ID NO: 169 - DNA, 1218 bp, Oryza sativa
atgggggtggtgggggcgttgctgggaccggaggcggaggcgctggtgaggctgcgggcggcggcgtggcggctgcggagggaggtcgccgccgccaccgacgacgacgagcactgggccttcgcctactccatgctgcaccgcgtctcccgcagcttcgccatcgtcatccagcagctcggccccgacctccgcaatgccgtggtgtgcgtcttctacctcgtgcttcgggcgctcgacaccgtcggaagatgatactagcatccctactgagattaaggtgcccattcttcaggaattccaccgtcatatctataaccgggattggcatttctcatggaacaaaggactgcaagattctgatggataaattccactatgttttgacagctttcttggagcttggttcaggtaccaagaggcaattgaagaaattaccaggagaatgggtgcaggaatggcaaagtttatatgcaaggagaggttgaaactgttgatgattatgatgagtactgtcactatgtggcagggctagtcggcattggactttcaaggctctttcatgctgctgggttagaagatcttgctcccgaatcgctttctaattcaatgggtttatttttgcagttgcagaaagtcaatattactcgggattacctggaggacataaatgagataccaaaatcacgcatgttctggccacgagaaatatggagtaaatatgttgacaaacttgaggatctcaaatacgaaaataattcagtgaaggcagtaaaatgcttgaatgagatggtgactaatggtttaatacatactgaagattgccttcggtatatgtctgctctaaaggatattactattctccgtttttgtgcaataccccagacctatgctctgtgctataacaatgtgaatgtatttcgaggagttgtgaagttgaggcgtggggctgactgcacgaataatcaatgaaacaaattctatggctgatgtgtacactgctttctatgaattctcttcactgcttgcagaaaagagattgatgataatgatccaaatgcgtcgcttacacggaaacgtgtgaatgcaataaaggagacctgcaaatcatccggtttgctgaagataagcaggggatatgacttggataggccaaaaaggaaccctgctatgctgctcttggtagctattttcttgggagctctgtataggaggtga

SEQ ID NO: 170 - protein, 410 aa, Oryza sativa
  X_region (159)..(159): Xaa = any naturally occuring amino acid
  X_region (296)..(300): Xaa = any naturally occuring amino acid
  X_region (351)..(351): Xaa = any naturally occuring amino acid
MGVVGALLGPEAEALVRLRAAAWRLRREVAAATDDDEHWAFAYSMLHRVSRSFAIVIQQLGPDLRNAVVCVFYLVLRALDTVEDDTSIPTEIKVPILQEFHRHIYNRDWHFSGTKDCKILMDKFHYVLTAFLELGSGYQEAIEEITRRMGAGMAKFICXGEVETVDDYDEYCHYVAGLVGIGLSRLFHAAGLEDLAPESLSNSMGLFLQLQKVNITRDYLEDINEIPKSRMFWPREIWSKYVDKLEDLKYENNSVKAVKCLNEMVTNGLIHTEDCLRYMSALKDITILRFCAIPQXXXXXTYALCYNNVNVFRGVVKLRRGLTARIINETNSMADVYTAFYEFSSLLAEKXIDDNDPNASLTRKRVNAIKETCKSSGLLKISRGYDLDRPKRNPAMLLLVAIFLGALYRR

SEQ ID NO: 171 - DNA, 816 bp, Oryza sativa
atgaaacgggcagggagcaagggtgttttggagtcatccttctcatcatccaagaagaccacccgccgtcagaagaaaccgcctacttcctctcttgaagaactagaactgccaaactcggcgatgaacaagatccaagaagtgcatgacatcgctagggatgtgttctttgcagccacgccaggctttgttccatcatcgttagccgaggcaaacctcaccaagttgctcgataccttgaagctagaggattttgggcttgatgcaagcatgccgtattttagagctgatcctcaagggcatcctaaagtaacatatgtgcactttggtgatgatagtcttaacttctcgtttggtgtgttttgtctaccacaatcggctgtcattccactccatgaccatctagggatgactgtctttagcaagattcttcatggctcaatgcacataaagtcgtatgactgggttaaaactcccaatggtaaaaatcgtatctgcagggaaatagatggtgctcattttgctaaggtgagaactaacaccatctacgatgattcatctaagacaacggttctatacccagagagtggaggaaaccttcattgcttcactgcagaaactgcttgtgcagtgcttgatgtcatgggcccaccatattcctcagttgaaggaagggactgctcatactatggagtgtgtccttcgccacgtggagtaagcaggcggattactgatgaactatctgattggttgagaaaagaacgttgcactttcaatatgaacgctgtgcttgtgaagccaagtacaatgacttga

SEQ ID NO: 172 - protein, 271 aa, Oryza sativa
MKRAGSKGVLESSFSSSKKTTRRQKKPPTSSLEELELPNSAMNKIQEVHDIARDVFFAATPGFVPSSLAEANLTKLLDTLKLEDFGLDASMPYFRADPQGHPKVTYVHFGDDSLNFSFGVFCLPQSAVIPLHDHLGMTVFSKILHGSMHIKSYDWVKTPNGKNRICREIDGAHFAKVRTNTIYDDSSKTTVLYPESGGNLHCFTAETACAVLDVMGPPYSSVEGRDCSYYGVCPSPRGVSRRITDELSDWLRKERCTFNMNAVLVKPSTMT

SEQ ID NO: 173 - DNA, 1495 bp, Oryza sativa
atggcggcggcgggcggtgctgtgctgctgctggtgctggcgaccgcgacttcggtgacagggcagcatgactacagcgacgcgctccacaagagcatcctgttcttcgagggccagcgctccggccgcctgccacccgaccagcgcctccgctggcgccgtgactccgccctcaacgacggcgccaccgccggcgtagtggacctgacgggagggtactacgacgccggcgacaacgtgaagttcgggttcccgatggcgttcacggcgacgctcatcgacttcgggcggagcttcggggcgcacgcggcggaggcgagggaggcggtgcggtgggcgacggactacctgatgaaggcgacggcgacgcccaacacggtgtacgtccaggtcggcgacgccttccgcgaccactcctgctgggagcgccccgaggacatggacaccccgcgcaccgtctacaaggtcgacccctcccaccccggctccgacgtcgccgccgagaccgccgccgccctcgccgccgcctccatcgtcttccgcgacgccgaccccgactactccaaccgcctcctcgaccgcgccaaggtgttcgagttcgcggacaagtacaggggcccatacagcagcagcctgcacgcggccgtgtgcccctgctactgcgactactccggctacaagcaggacgagttgctgtggggcgcggcgtggctgcacaaggcgtcgcggcgccgggagtaccgcgactacatcaagcggaacgaggtggtgctcggcgccagcgaggccatcaacgagttcggctgggacaacaagcacgccggcatcaacgtcctcatctccaagttgattttgcaggaggtcctgatggggaaggacgagtatttccagtcgttccgcgtgaacgccgacaacttcatctgcaccctcctccccggcatctctaatcatccccagatccagtactccccaggggctgctgttcaaggtgggcaacagcaacatgcagcacgtgacgtcgctgtcgttcctcctcctcgcatactccaactatctcagccacgccaacgtccgcgtcccctgcggcacctcctccgcctcccccgtccagctccgacgcgtcgccaagcgccagcaggtggactacatcctgggcgacaacccgctgcggatgtcgtacatggtgggttacgggtcgaggtacccgctgcggatccaccaccgggggagctcgctgccgtcggtggcggcgcacccggcgcagatcgggtgcaaggccggggcgacctactacgccagcgcggcgcccaacccgaacctcctggtgggcgccgtggtgggcgggcccagcaacaccagcgacgcgttccccgacgcgcgggccgtgttccagcagtccgagcccaccacgtacatcaacgccccgctcctcggcctcctcgcctacttctcggcccaccccaacctggcccagtccgatctcctctacgactga

SEQ ID NO: 174 - protein, 504 aa, Oryza sativa
  X_region (92)..(96): Xaa = any naturally occuring amino acid
  X_region (126)..(126): Xaa = any naturally occuring amino acid
  X_region (202)..(202): Xaa = any naturally occuring amino acid
MAAAGGAVLLLVLATATSVTGQHDYSDALHKSILFFEGQRSGRLPPDQRLRWRRDSALNDGATAGVVDLTGGYYDAGDNVKFGFPMAFTATXXXXXLIDFGRSFGAHAAEAREAVRWATDYLMKAXTATPNTVYVQVGDAFRDHSCWERPEDMDTPRTVYKVDPSHPGSDVAAETAAALAAASIVFRDADPDYSNRLLDRAXKVFEFADKYRGPYSSSLHAAVCPCYCDYSGYKQDELLWGAAWLHKASRRREYRDYIKRNEVVLGASEAINEFGWDNKHAGINVLISKLILQEVLMGKDEYFQSFRVNADNFICTLLPGISIIPRSSTPQGLLFKVGNSNMQHVTSLSFLLLAYSNYLSHANVRVPCGTSSASPVQLRRVAKRQQVDYILGDNPLRMSYMVGYGSRYPLRIHHRGSSLPSVAAHPAQIGCKAGATYYASAAPNPNLLVGAVVGGPSNTSDAFPDARAVFQQSEPTTYINAPLLGLLAYFSAHPNLAQSDLLYD

SEQ ID NO: 175 - DNA, 837 bp, Oryza sativa
atggggtggggcataccgacgcggccgccggcgacgtcgacgccgtcgcgggtgcaggcgctgtacgagctctgcaagcgcaccttcccgtcgccgtcctccgtcgccgcgtcctcctcgccgtcgtctccacctcccgaccacgccatcggcgccatctcctctctcatggatacaatcactcctgtggatgttggactcagagatgataatcttgaggatggaagaggatttgggttctttgaatcaaacttcttgaagaattcagcaagggttgctagatgggcgcaacccataacctacctgcatgtctacgagtgtgacgccttctctattggaatattctgcttaccaacatcggcggttattcctctccatgatcatccgggaatgactgtgttgagcaaattactctatggttcgatgcatgtcaaatcgtatgattgggtagagcctgctgttctagcaaatggcaagccagtgaaacttggaaagttacatacggatgatgttctgaatgccccttgtccaactgctgttttgtatccccaaagtggtgggaacatgcactgcttcacttcagtaaaatcatgtgctgttcttgatgtcattgccccaccatactctgaatcttctggccgtgtttgcacctattttcacgattatccattttctagcttctcagctggacaagcaaaagtagtccatgggccagataattatgcttggcttgaggccttaatcgtaccggtgaatattaatatgcgccctggcacgtacactggcccaactatacagcaaccaaaacgtgcttgggagttgagagttgagagttga

SEQ ID NO: 176 - protein, 278 aa, Oryza sativa
MGWGIPTRPPATSTPSRVQALYELCKRTFPSPSSVAASSSPSSPPPDHAIGAISSLMDTITPVDVGLRDDNLEDGRGFGFFESNFLKNSARVARWAQPITYLHVYECDAFSIGIFCLPTSAVIPLHDHPGMTVLSKLLYGSMHVKSYDWVEPAVLANGKPVKLGKLHTDDVLNAPCPTAVLYPQSGGNMHCFTSVKSCAVLDVIAPPYSESSGRVCTYFHDYPFSSFSAGQAKVVHGPDNYAWLEALIVPVNINMRPGTYTGPTIQQPKRAWELRVES

SEQ ID NO: 177 - DNA, 2355 bp, Oryza sativa
atgaagtcttctctaggttctcttctcctgtgcatttctctcgtttcttctcccgtcggcctttttagcttgtggtcgattttcctcgggcttcttttcgattgtgctcttcatctgttggattgccctaagagcttgtatcggggttctccgggtgatctatttgattgtccacaaaaggaccggagttactcatttttggtttgctctaaggccgtgggtatttggatctataatctttgttcttttatttgcaaagattttcatgcccggttccatctttggagagatggtggccctaattggcagaaagaatggatgctctggtgcgctgaacagaattcggaatggaccctagtctccaggaaatctaagaagtttgattctgttcataaccattctcgaaaaagttatattaagactgttattgctgctaagccgattaatcatcctaaattttcttcttccaagttgcttaatctttctaaagtttctgctactaagttgattaatcctccaaaggtttcagctgttaataagtctagcaatttcaagcgccctacagctggttcttcaaagggtccgatttccaatgctgagtccttgaatgttgttcctgttaaatcagtctttgatcgtcttcgatttccggagattgccgccggcaaagctccgggcccggtcagatgtgcttcctgtcacaaattggatcaccgggctttagcctactggaataaaaagaaggcccaagtttggaggcccaaaaaggattctatgcctgcggctaagaagtctattgtggaaagggcagttttagggaaagaaataatttgcttcaaaaatcaaggaagcccttcctcttcctctcaaaagttgcagtctgcccctcttttgctcttgacctcttcgccgagtgctccaatggcggtggtgaaccctgatcctgcattttttctccctctgacgctgcagctccttgagccctgggatcatcagcttgagcgtgctgatctttgcctccaggaagatccccctaagcgcaatgaaggtatggctgtcgcttgcattgaacctccaccaactcctgagcaatatgaaggtttcagacatctggtgattaactatgttcagaatgtgctgggctatcatgtgttagaagctagccgtcaccctattgagttcatgtatgttcgtgtagcttctgctctgcttagagatactctaatagctgggggtccttatgaagtggataatcagtttatgcttcgctttgttcctcatgaccttacttccagttgtcgcaactcccctttcacttcagagggatggacaatgtttttggatttcccattggatttcaaaactcctgctattattgacaaagctgtctctctgtttgggaaagtgatcaaagttcagttagatgataatctgccggcaccacaagtggatgcttttggggataatatggaagaggatgctccagctattcagcaaaattctcagcctcttagtgctgtctctttggtggctggaaatctaaatgttatgctgcagtctcagggctcaattactcttgagcaactcatgcagcctcgctttctggttaatccgtttttttggaagatgttaaacgctctgaatgctgctctgtcaagctgggaagattacgtgccaaaacctcaagttacaagtgctttcagtctgttgcctctttctcctcagtggtcaagggcagtgggtccatcccaagagcttcaaattatttcctactctttgcctattacccatattattcagtttgccctcttagcagctgttctgctggtggctgggaatgaaactgaggttgaacaggctgagggagatttgggacatgagtatatgaatgaggcgcatatgtttgaagatgctgaaatggatccattccatcaaagtgcctcttcctgcctgccatctttgaagaaatccagaaagactaaagctaaaactgtggcaattgtggacactgatcgtaggagaagctccagaatcaataagctcacagggggttacatgtctcctgatcccaagcagggggttggtaaacccagggggaaaagtgctaaaaggcttaagcttctggcagaacaaagtggtataatctccttcctccaccctttacctcctgagttctttgagactgatgacaatagtgactctgagagccctcctattgaatgctctattcagatgttgcagactatgggcactaatctttgtgggctgaaggaaaatgaagtttctgctcaagttctgaccactccggctgggctagggagtggatctgctgctacttctacccagttgccatga

SEQ ID NO: 178 - protein, 784 aa, Oryza sativa
MKSSLGSLLLCISLVSSPVGLFSLWSIFLGLLFDCALHLLDCPKSLYRGSPGDLFDCPQKDRSYSFLVCSKAVGIWIYNLCSFICKDFHARFHLWRDGGPNWQKEWMLWCAEQNSEWTLVSRKSKKFDSVHNHSRKSYIKTVIAAKPINHPKFSSSKLLNLSKVSATKLINPPKVSAVNKSSNFKRPTAGSSKGPISNAESLNVVPVKSVFDRLRFPEIAAGKAPGPVRCASCHKLDHRALAYWNKKKAQVWRPKKDSMPAAKKSIVERAVLGKEIICFKNQGSPSSSSQKLQSAPLLLLTSSPSAPMAVVNPDPAFFLPLTLQLLEPWDHQLERADLCLQEDPPKRNEGMAVACIEPPPTPEQYEGFRHLVINYVQNVLGYHVLEASRHPIEFMYVRVASALLRDTLIAGGPYEVDNQFMLRFVPHDLTSSCRNSPFTSEGWTMFLDFPLDFKTPAIIDKAVSLFGKVIKVQLDDNLPAPQVDAFGDNMEEDAPAIQQNSQPLSAVSLVAGNLNVMLQSQGSITLEQLMQPRFLVNPFFWKMLNALNAALSSWEDYVPKPQVTSAFSLLPLSPQWSRAVGPSQELQIISYSLPITHIIQFALLAAVLLVAGNETEVEQAEGDLGHEYMNEAHMFEDAEMDPFHQSASSCLPSLKKSRKTKAKTVAIVDTDRRRSSRINKLTGGYMSPDPKQGVGKPRGKSAKRLKLLAEQSGIISFLHPLPPEFFETDDNSDSESPPIECSIQMLQTMGTNLCGLKENEVSAQVLTTPAGLGSGSAATSTQLP

SEQ ID NO: 179 - DNA, 1536 bp, Oryza sativa
  misc_feature (192)..(192): r = adenine or guanine
  misc_feature (265)..(265): m = adenine or cytosine
  misc_feature (267)..(267): m = adenine or cytosine
  misc_feature (749)..(749): k = guanine or thymine
atgaccaaaatcaacctcgcagctccaccaggcaacctgttcgacggaatgcagcagggagcggcggggcaggctgggccgtcgggtggtggtggaggcggtggcggtggcggtggcggtggcgcggaccgcctcagcgcgctcccggacgcggtgctcttccggatcgtgtcgcacctgggggcgcggcargcggtgcgcacgagcgtgctatccaagcggtggcgccacgtgtgggcgtccgcgccgcgcgtcgacgtccgcmamccctgcgcctgcgacgagagcgccgaccaggagaggttccacggcttcgtcaccaccatgctcctcaggcgccgcccgttcgcccccatcaaggcgctccggctgtgctggagccacgacggcgacgccaacaactggatcgctcatgctgtcaggcgtggggccgaagaaatcgatttctccgcgaggcatcaccaagatgatccgaaaccggagctagagtacacgagcttcatttctcacaagatcaagatcttgaagctgacgcgtgtccggatgggcatcaagtttatcacgcagatctgctataggtgcacttttttggaagaattagagctcaagaatgttaattcacttgaagggcagattcaatcgacctcgctgaagcgcttgtctatcatcaactgccttatctctgatggatttttggttgatgctccgaaccttatctcgctctgcttcttcagacctctcagcgtgtkggagtttgatgacgatggatctgatcatgatgatgatttctttgcaattgctagtggtggtgaacactttgatgataagagagacaatgaatctgatcaagacaatggttctagtgatgaagactcagatgataagagagaccaagaatctgatcatgatgaagatgttccctcttccccatattctgattctaaggactcctgtgatggcagtgacagtgaatgcgagtcttatgaatccagtgataaggagggtgatgatcttgaagattgcgacagcaatgatatgttggaaaacttgatcaaggtagctaggggcttgacagcttatcatggagaggtgcttctgaggaggcaattggaaaatttccccatgttcaataacctgaaaactctgtcccttggtgaatggtgtatggttcctgacttcagtgctttgtcaaccatacttaagaaatcacctaaggtagaaaggctttatcttcaccttgacatgatccacagaggaagaggggacatcgatccaagtggaggatcatttgcttgcaacaacctgaggaaggttaagatcacatgttgtaaagatgatgaaatggtccatatgctgaaacaattcctccaacgtaacggcatatcacttgagaagattgttcatcacacttctagcactcataatggcgaagaagacggaggcggggactccagtgcgaaacggaaggcgcaaggcgaagttgcgaggctagcagtgaaacagaggagggcgcgaaacagtagaagcccggagtga

SEQ ID NO: 180 - protein, 511 aa, Oryza sativa
MTKINLAAPPGNLFDGMQQGAAGQAGPSGGGGGGGGGGGGGADRLSALPDAVLFRIVSHLGARQAVRTSVLSKRWRHVWASAPRVDVREPCACDESADQERFHGFVTTMLLRRRPFAPIKALRLCWSHDGDANNWIAHAVRRGAEEIDFSARHHQDDPKPELEYTSFISHKIKILKLTRVRMGIKFITQICYRCTFLEELELKNVNSLEGQIQSTSLKRLSIINCLISDGFLVDAPNLISLCFFRPLSVLEFDDDGSDHDDDFFAIASGGEHFDDKRDNESDQDNGSSDEDSDDKRDQESDHDEDVPSSPYSDSKDSCDGSDSECESYESSDKEGDDLEDCDSNDMLENLIKVARGLTAYHGEVLLRRQLENFPMFNNLKTLSLGEWCMVPDFSALSTILKKSPKVERLYLHLDMIHRGRGDIDPSGGSFACNNLRKVKITCCKDDEMVHMLKQFLQRNGISLEKIVHHTSSTHNGEEDGGGDSSAKRKAQGEVARLAVKQRRARNSRSPE

SEQ ID NO: 181 - DNA, 1818 bp, Oryza sativa
  misc_feature (458)..(458): s = guanine or cytosine
  misc_feature (486)..(486): k = guanine or thymine
  misc_feature (618)..(618): w = adenine or thymine
  misc_feature (712)..(712): m = adenine or cytosine
atggttgcgctccaccaaaatgatttcctctgtttcctctctctcagctatttgcagcgtgcctatgacccgggaacacggcgcgtgcacatctcccgcgacgtcatgttcgatgaggcttcacagtggaggtgggatggcgagacggcgtctgacctctacaccgactttgtcatcgagtacaacacggtgtaccacccaagcgctaaggctggacaacatcaaggccacaatggatcacccacgccggccgcgacctcagatgcatctgaggtggaatttgtgtcgccaccacttggagctaaagagaacctcgacgctgatcatgatgacgtgctgctccgttaccgcaccatcgagaatgtgcaggctgagcaagaggaggcttcgcgtcgcgccatgctcgacgaaattgcttcaattgaagaaaacaagacctggagactggttgatctacsgcctggacatcgaccgatcaggttgaaktgggtgtacaaattgaagaaagacgctcgaggggtcgtcatcaagcacaaggcgcgactggtggccaaaggctatgtgcagttagccggaattgattttgatgaggtattcgctctagttactcgtctcgawtctttacgcctgttgcttgcccttgccgcgcaggaagctgaggaggtatatgttgcccaaccaccgggattcgaagttaagggggaagaaaccmaagtgtactggctggtcaaggcactgtacgggctacgacaagtgccccgagcttggaataccaagctggactgtactctgaagaagctaggctttgtgcaaagcccgctggagcatggtttatatgcacgcggtgctggcggttcgagactgctggttagtgtttacgttgatgacttggtgatctttggagcagatgatgccatgattggtgattcagaagggggtgccatcagtctgaaccaggcagcctatgcgacgaagatcgtggagaaggctggccttgtgggatgcaatccttgtgctacacccatggagccacggctgcggcttagcaaggaaagtacaacgccattggtagatgccactgaatatagaagtttggttgggagtctatgctatctagtgaacactagacccgatcttgcgttcgccgttggatatgtaagctggttcatggagagaccaacggacgaacacctggcagctgtgaagagaatcgtccggtatctggcgggaacgatccatctgggatgtcgctacacaaaaggtggggagaagaagctgcaaggctatagtgacagtgacatggctagcgacattgacactcgcaagagcattaccagcagctcagagcaagaaagaattcaggagcagagagcaaaccttgatctacagttctacacggtccttgtcgcacagctgccgtcgtttctagccagactggatgtcccccatgatctgtgcgtcgccgctcgcccgtcgctgcaccctgccaactcctcccatgacgccgtgcctagcgtcctacctgcgcatcccaccacaccatgcctagagaccatgccattcccggaggccgacgtttgggtgggcttagtgggctgggcaattggggagctcatatggtcaatgcgttgctggattgactcagttactgatcctgtcaacactggaggggaacttgtagacatcctgacgagcaaaattccaggaactgcgggaacaaattggtatgatttcgggcatctgaggctagctcgctgttcgcgtcgtgtgccggaatttgaggacacgttgtgtggctgtggggatagacgcagctag

SEQ ID NO: 182 - protein, 605 aa, Oryza sativa
MVALHQNDFLCFLSLSYLQRAYDPGTRRVHISRDVMFDEASQWRWDGETASDLYTDFVIEYNTVYHPSAKAGQHQGHNGSPTPAATSDASEVEFVSPPLGAKENLDADHDDVLLRYRTIENVQAEQEEASRRAMLDEIASIEENKTWRLVDLRPGHRPIRLKWVYKLKKDARGVVIKHKARLVAKGYVQLAGIDFDEVFALVTRLESLRLLLALAAQEAEEVYVAQPPGFEVKGEETEVYWLVKALYGLRQVPRAWNTKLDCTLKKLGFVQSPLEHGLYARGAGGSRLLVSVYVDDLVIFGADDAMIGDSEGGAISLNQAAYATKIVEKAGLVGCNPCATPMEPRLRLSKESTTPLVDATEYRSLVGSLCYLVNTRPDLAFAVGYVSWFMERPTDEHLAAVKRIVRYLAGTIHLGCRYTKGGEKKLQGYSDSDMASDIDTRKSITSSSEQERIQEQRANLDLQFYTVLVAQLPSFLARLDVPHDLCVAARPSLHPANSSHDAVPSVLPAHPTTPCLETMPFPEADVWVGLVGWAIGELIWSMRCWIDSVTDPVNTGGELVDILTSKIPGTAGTNWYDFGHLRLARCSRRVPEFEDTLCGCGDRRS

SEQ ID NO: 183 - DNA, 3849 bp, Oryza sativa
  misc_feature (3804)..(3804): y = cytosine or thymine
atgaagatgctcgatctgctggaggacaagctcagcatcctccgcggcgagagcctgcagggcgtcgacgccgacagggaggaagaggcggccgcgtggctgcggcaggtgaaggaggccgccgacgaggcggaggagctggtcaacgccatggaggcttccgcggcggccgcagcttccgatagtagcagcctcctcctcggggtgaagtacaccgtcggcaagctcgtcagcgcgtgctccgaggtcgaatcgcttcttcccgtgccgggcctggacgaggatggactggaaaccccgggggatgacgtcgccgctttgccccctggccctgaccaaccctttgttgttgggcgagatgaggaaataggtgtcatattggagatgatactggatgatgcccgtttcgtggcggatgaatcggttgaggagagggcaagtgctgatggatcacagatttctcggaaaggatggatcatcgatgccctccggagcatagatctatctgaccagagaaaccaacctgcagaatcagcagcagcataccagaaagaaatgggcagcagagtgaaatacaccagggtgcagagcagcactgtcagttcaatgtgcaatccaactgtcattccaattgttggagtgggtggagtggggaaaacagctcttgctcagttcatcttcgacgacgaaagggtgcgggagcacttccgcggtaattccgcatgggtgtatttcactgacaacatcaggaaagaagaaccgatggcgcagatctttgtatcgatgcaacctgagcataatatgctggaccatgctttcagtctaaacagcctccgtgtccaacttcagagcgtcatagaaggcaagaggttcttgcttgtgcttgatgatgtatctgatgagatacgtgcaatgtggggcgatttaaggagtgcactgaagaagggagcacctggaagtgttgtcttagtaacaaccaatctgtatagtgtggccagctttgtgggaactacaactccagtatttttggattatctacattatgatgacctgtggaagctttttaagcatcatgcatttgccagttatcaaactaatggttttgttgaactggacaacactactgttgcaagaaaactggaggatgtagctggtgaatggtttgatgaactagtcaataagtgcttcttacaaccgacagtttggaaagcttggtatattatgcatagttgggttagagactttgcaatcgccttatcttctaatgaatatcagggtgttgattgtacaatgggaaatctcccacgaagtgtacgtcacttgtccgtagatatggatgctatgaatataccatggaccgagtatagcattaaacagttgcgatcattaatattattcggtggcttccgtcataacaactctagcaaaggtttcaacaacatttacaacattttggagggcagttatgatgctgctgatagcatttctgagaggtcttataacactactgacaaggacactgctgataacatttctgagtggtcctctttcagttttgatgatggggaagttgatatcgttgctatcattttgaaaaggtattgtgacattattggtagcattctaaataggtcaacaagcttgcgcttgttgagcttatctaacttgagagcaaattcagcaacagcatgcattggtgattatccacttgaagaagatggcattgcacaatttgtggagttcaccacaacacatcagatgctgccctatttgactcacctcagatacttggatttttcacacagtgggataaccaaactccctgattcattatgtagcttgtgcaatctccaagttcttggtttgagaggttgtagattcacacaattaccaagaagaatgaactcactagttggcctacggcacttgcatgcagatgcagatacggttgctttaattcatggcattggacagcttaccaggctccaagacttatatgaataccgtgttaaagcagaggatggtcacacgttaattgagttaaaggacatgaggtatatccaagggtccctttgtatatcagatctacagagggtggctaatcgagaagaggcaattcaggctaacttaggaaggaaggagtatgttacctgtttagctctgaagtgggatagaaatcagtcttctagaggtaaatataatctatatggaaaggagttgagtcaattcgacagaggtcaaaagcagccacttcaagctagcttagttgagaagaattatacttcagatatatcaggatatctgatgaatccaccagaggtaattaaacctgatcaagacatggagatattagagtgtttgtccccaccaagaaatctgcagacgataaaattttttggctacacaggtttggcttttccagattgggtcgtacaactccggtatataaaagttattgagataagccattgtacagaactccaggtgcttcctccttttggacagcttgagcatcttaggaaactaattttgcatgagctgccctccatgaaggatgttagttctgatgtctatggaacctcaaatgtggcctttaaatctttggaaatcctgtgttttgagtctatggggaagttggaaaattgggcagattcacagaacgaagaaagcttttcaaacctgcaaaatctgcagattaatagatgtgataacttgagggaactacctttgatgtccttgggcttagctatcagaaaactctctcttacgggttgtggatcatatgctgaaacagtcttcaggtatttgcaaaaactaactagcctcacacacttgagcataaatgattgctcccagaagttaatccttccatgtcaaaacctgatatcattggagaatctgcatctttcaaattgtaaggagctatactttgagggtggaattcttcgtcttaacaaccttaaaaatctacatatttctggctgccgcaaaatcatatcgacagttgaggaagagattaaccgactgttttctaactgggaaataaggttgggcaaagaccagtcacttgttctcaaaagtggactcctcaatatagccaaagagctgggtacaaaaaggagagaactcccccttcccggttctccgcaaaaagaagaatttatgcatactttacaatatctcactgaccttacaatggataacctttcccagtcttcagatcttgataattttctttgcaagctttcagcacttcgaactctgtgtctccacaagatcgatgtgatctctcttcaccaagagaagtggcttgagcagattacatccctacaagagcttgagttctcttgttgctacctgctaaggcagctcccatcaaacttggtcactctgtcatccctgaagaagttaaatatgcagtcatgtttccaaattcactcgctaccattgaaaggcctaccaggtaacctaagagagttacaaatattaggatgctcacctatactagaggcacgatgccagaaggaagatggagagacatgggtgaagaagaagagaggggaatggcataaagagacgataaacgagtaccgacagaagaaaacatgtgagttctgggaagggtggttaaagtatgaggaagagtgggtggagagtgctacagatcatctgaacgataagggagagtggttagagaatgaagaagaggactggctgaagaataattcagatgaactggaaaataatgaagatgtgtggctcaagagtaggggcgaagactggccaaagattgctcatattccytatatccgtgtgaatggagatattatacagaatttttatctgtga

SEQ ID NO: 184 - protein, 1282 aa, Oryza sativa
MKMLDLLEDKLSILRGESLQGVDADREEEAAAWLRQVKEAADEAEELVNAMEASAAAAASDSSSLLLGVKYTVGKLVSACSEVESLLPVPGLDEDGLETPGDDVAALPPGPDQPFVVGRDEEIGVILEMILDDARFVADESVEERASADGSQISRKGWIIDALRSIDLSDQRNQPAESAAAYQKEMGSRVKYTRVQSSTVSSMCNPTVIPIVGVGGVGKTALAQFIFDDERVREHFRGNSAWVYFTDNIRKEEPMAQIFVSMQPEHNMLDHAFSLNSLRVQLQSVIEGKRFLLVLDDVSDEIRAMWGDLRSALKKGAPGSVVLVTTNLYSVASFVGTTTPVFLDYLHYDDLWKLFKHHAFASYQTNGFVELDNTTVARKLEDVAGEWFDELVNKCFLQPTVWKAWYIMHSWVRDFAIALSSNEYQGVDCTMGNLPRSVRHLSVDMDAMNIPWTEYSIKQLRSLILFGGFRHNNSSKGFNNIYNILEGSYDAADSISERSYNTTDKDTADNISEWSSFSFDDGEVDIVAIILKRYCDIIGSILNRSTSLRLLSLSNLRANSATACIGDYPLEEDGIAQFVEFTTTHQMLPYLTHLRYLDFSHSGITKLPDSLCSLCNLQVLGLRGCRFTQLPRRMNSLVGLRHLHADADTVALIHGIGQLTRLQDLYEYRVKAEDGHTLIELKDMRYIQGSLCISDLQRVANREEAIQANLGRKEYVTCLALKWDRNQSSRGKYNLYGKELSQFDRGQKQPLQASLVEKNYTSDISGYLMNPPEVIKPDQDMEILECLSPPRNLQTIKFFGYTGLAFPDWVVQLRYIKVIEISHCTELQVLPPFGQLEHLRKLILHELPSMKDVSSDVYGTSNVAFKSLEILCFESMGKLENWADSQNEESFSNLQNLQINRCDNLRELPLMSLGLAIRKLSLTGCGSYAETVFRYLQKLTSLTHLSINDCSQKLILPCQNLISLENLHLSNCKELYFEGGILRLNNLKNLHISGCRKIISTVEEEINRLFSNWEIRLGKDQSLVLKSGLLNIAKELGTKRRELPLPGSPQKEEFMHTLQYLTDLTMDNLSQSSDLDNFLCKLSALRTLCLHKIDVISLHQEKWLEQITSLQELEFSCCYLLRQLPSNLVTLSSLKKLNMQSCFQIHSLPLKGLPGNLRELQILGCSPILEARCQKEDGETWVKKKRGEWHKETINEYRQKKTCEFWEGWLKYEEEWVESATDHLNDKGEWLENEEEDWLKNNSDELENNEDVWLKSRGEDWPKIAHIPYIRVNGDIIQNFYL

SEQ ID NO: 185 - DNA, 4357 bp, Oryza sativa
  misc_feature (588)..(588): m = adenine or cytosine
  misc_feature (600)..(600): m = adenine or cytosine
  misc_feature (663)..(663): r = adenine or guanine
  misc_feature (666)..(666): m = adenine or cytosine
  misc_feature (687)..(687): r = adenine or guanine
  misc_feature (694)..(694): r = adenine or guanine
  misc_feature (699)..(699): r = adenine or guanine
  misc_feature (704)..(704): m = adenine or cytosine
atgtcatactacgtagatccttatatcaacgtaccccaataccctctatatccggtctacgggtatcccccgtcgatagtggcgcgccaggggactggtattcaaggttctactactatgccatcaagcttcgtcgacaacaacgccaacaccagctccggtcaagttcttcccacctcaaccatgctggtatggactcaagtcggcgaaaccgtctacccggtttacaccacaatgccgatctcaaccggtcccccaatgaccggaaacgagaacgcggtggctacgaaccaagacgcctccacatcgaagaatccacccgttgaaacggaaaacggattaccgactacatccaagttcgtgaaggattctgatgcggccaggccttgtccctccgacacaaaccgcgggccagcaaagatgaattccgaaactatcaggtcttggtgtcctatccataaaaccaacaaacatactcttcaagattgctgggtattcgtcaacgctcgtgctgagatccgcgcctgcaaggaacgtgggatccagcgtacttctccaacttggaacgtctattgttctatccatacmaagaatcacgamctctcgagttgcaaagttctactcggcgccatgaaaactccgtctcctaagtcatacgtcccrtcmagggactatgggtcatcgacrtcagacrcggcrcgggmggtgttggctatcgatgacgttggcacgccttcggtcgttccctacgtgatgtccgatggcctgagagattccgacccggagctattgaaaagtatgatgggagcaccgacccagaggaattctttcaagtctactcgacagtgctttatgttgctggagcagatgacaatgcattggcaaattatttaccgaccgcgttgaagggttttgcacgttcgtggctgatgcatctccccctactcaatctcttcgtggatcgctacactacccaggagttggcgacaaggcgcatcacaactactcgaagattattcgagatcgttgaaagatgtgcccacgtcgacgacgcactaagacgcaagaacgacaaaccgaagactgggggagagaagaagtcagtcgcagacacatctgagtcgagcaagaagaaaaatcgcaaaaaggggaaaaggaaagctcaagcagaagtcctcgcagcagaatacgcgaaccttcccaagcgcccgactctggatgcaatgggaattccacaaagtgagttgacaccaactgatcaacccttccatggaattactccccaatcatcatccagacctttgggcaagattacgttacctgtaacctttggccaggccaacaacttccgaacagagcagataaccttcgatgttgctgaattcgatacagcttaaaacgccatcatcgggaggactgcacttgtgaagtttatggccgcatcccactacgcatatcaagtgctcaagatgccgggatcgaagggaacaatcactattcaagggaacgcaaaactggcggtgcagtgcgacaagcgaagcctcgacatggtcgagcaaacgcccactccacccgccatgtctgagccacccaagaaaaaataggaactcgcgctcatcgccttcctccgcgacaatgccgacgtgttcgcttggcaaccgtccgacatgccgggggtccccagggaggtgattgagcacaaactaatggtgcgacccgatgccaagccagtcaagcaaagactgcggagatttgcaccagatcgaaaacaagccatacgagaagagctcgaaaaacttctcaaagctggcttcatcagggaagtactccatccagagtggcttgccaatccagttatggtgcggaaagccaatggtaaatggagaatgtgcgtcgacttcacagacctcaacaaggcgtgccccaaggatcacttccctctccctcgaatagaccaactggtggattcaacagccggatgcgaactattaagcttcctcgacgcttactctggctaccaccaaatcagcatggctaaggaggacgaggagaaaacagcgttcatcactccgttcggagtattttgctacgtcaagatgcccttcggattgataacagctggcaaaactttccaacgcacggtccagggcgcacttagcaatcaacttggcaacaatgtcgaggcgtacgtcgacgacatcgttgtcaaaaccaagacaagcgactcattgattgatgacctccgggaaacgttcgacaacctccgacgatatcgtctcatgctcaatccagagaagtgcacgttcggagtaccgtcgggcaagctactcggattccttgtttctggcagaggaatagaggcaaatcccgagaagatcaaagcaatcgagaacatgaagtcgcccacaagactcaaggagaggaagccgaagaggcatttattgcactcaagcgctacctatcaaacccccttcctttatattgccgctacgccatactccgttagcactgtcattgtcgtcgagcgagagaaagtacagtgaccagtctattacgtcagcgaagctctccatggcgcaaagacaagatatccacagattcaaaaactgctctacgcagtcatcatgacatcaaggaagctacgccactactttcaagcccacagagtcacaattgtttcctccttccctcttggcgaagttgtgagaaacaaagacgttgtcggccgcatcgcgaaatgggtagtcgagctaagccaatttgatgtccacttcatgccgcgaacagccattaaatctcaggtactcgccgacttcgtggccgattggaccatgccagataacaagtcagataaccaaggcgacaatgagacatggacaatggcgttcgatggcgcactcaatagccaaggagcaggggctggatttatcttaacatctccatccggagatcaattcaaacacgcaatccatctcaacttcagggcaactaacaacactgcagaatacgaaggactactcgccgggatacgagctgcagccgcacttggggccaaacgactaatcgtcaaaggggactctgagctagtcgcaaaccaggtacacaaagactacaagtgctctaaccccgagttatccaagtaccttgcagaagtcagccctcggtaaaagaagttagtggcgaagttggcccgagcacccccgacatcagttcggaggtcaccgaggcagaacgcgctgtggctgaaatcgaaaccacggatgactggcgcaccccattaatcaaattcattagcagcgaggagttacccgaagacgatacggaggccgagaaaataacccgtaaagcaaaaatctactgtatggtcggcaatgatctatacaaaaaagcaccaaacgggatacttctcaaatgcgtctctaccgacgacggcagacaactcctcctcgacatacatgaagacatatgcgggtcacacgccgccggtcggacattggtcggcaaagcctttcgccaagggtttttctggccaacagcccttaaagatgcatgcgacatggtccagcgatgtgaagcctgtcaattccacagcaaacacacaaaactgcccgcacaagtgcttcaaacaatccctctgacttggccgttctcgtgctgggggctagatatacttgggccattcccaagaggacagggcggctacaaattcctatttgtagcaatcgacaagttcaccaaatggatcgaagcatcacccactggagaaatcaaggccgataacgccatcaagttcatcagagggatattttgcagatacggactaccgcaccgcatcataaccgacaacagctcccaattcatcagcgccgatttccaagattactgcatcggcttaggagtcaaaatatgcttcgcctcggtctctcaccctcaaagcaatggacaagtcgaaagggcaaacggcatagtactacaagggataaaaacccgcgtctacgacagactcatgtcacacgacaaaaaatgggttgaagaactcccatcagtactatgggccgtgcgcactacaccgacaacgtccaataaggaaacacccttcttcctcgtgtacggctctgaagccatgctccccggtgagctacgacatcaaagtacacgagtacagaagcattccgacgagaaccaggatgaacagcgagacatcaatgtaaaccttctcgaggagcatcatgagcgagttgccgtacgagcagcaagctaccaacaggccctgtctcgcccggaatttctatccaaaattccaaacgcttacatgtgtataaacactcgtccaggaatcagccgaggcacacaataa

SEQ ID NO: 186 - protein, 464 aa, Oryza sativa
ELALIAFLRDNADVFAWQPSDMPGVPREVIEHKLMVRPDAKPVKQRLRRFAPDRKQAIREELEKLLKAGFIREVLHPEWLANPVMVRKANGKWRMCVDFTDLNKACPKDHFPLPRIDQLVDSTAGCELLSFLDAYSGYHQISMAKEDEEKTAFITPFGVFCYVKMPFGLITAGKTFQRTVQGALSNQLGNNVEAYVDDIVVKTKTSDSLIDDLRETFDNLRRYRLMLNPEKCTFGVPSGKLLGFLVSGRGIEANPEKIKAIENMKSPTRLKERKFFQVYSTVLYVAGADDNALANYLPTALKGFARSWLMHLPLLNLFVDRYTTQELATRRITTTRRLFEIVERCAHVDDALRRKNDKPKTGGEKKSVADTSESSKKKNRKKGKRKAQAEVLAAEYANLPKRPTLDAMGIPQSELTPTDQPFHGITPQSSSRPLGKITLPVTFGQANNFRTEQITFDVAEFDTA

SEQ ID NO: 187 - DNA, 2355 bp, Oryza sativa
  misc_feature (1401)..(1401): k = guanine or thymine
atgcgcgcggagggtgtatgctgcaatgagttcgctctccctgttgtgctcaagtgcgtgccggacgcccgcctcggtgcgcaggtgcacgccatggcgatggctacggggtttggcagtgacgtcttcgtggcgaacgcgcttgtggccatgtacggtggatttggcttcatggatgatgcgaggagggtgttcaatgaggctgacagcgagaggaacgccgtctcttggaatggcctgatgtcagcgtatgtcaagaatgaccagtgcggtgatgccatccaggtgtttggtgagatggtgtggagtgggattcagcctactgaatttgggttctcttgcgtggtgaacgcctgcacgggttccaggaatatagaggctggaagacaagtgcatgctatggtggtacggatgggctatgacaaggatgtgttcacggccaatgcattggttgacatgtacatgaaaatggggcgtgttgatattgcttctgttatttttgagaaaatgcctgattcggatgtggtctcctggaatgctttaatttctgggtgtgtacttaatggtcatgatcaccgtgcgatagagttgttactgcagatgaaatattcaggactggttcccaatgtgtttacgttgtctagcatcctgaaggcttgttctggtgctggggcatttgatttgggtcggcaaatccacgggttcatgatcaaagccaatgcagattcagatgattatataggtgttggtcttgtggatatgtatgcaaagaaccattttttggacgatgcaaggaaggtgtttgattggatgttccatagggatttgattctgtgtaatgcactgatatcaggttgttctcatggagggcgacatgatgaggctttgtccctcttttacgagttgagaaaggagggtctcggcgttaataggacaacattggctgctgttctcaagtccacagcaagcttggaggcagccagcaccacaagacaggttcatgctcttgcagtgaagataggtttcatatttgacgctcatgttgtcaatgggcttattgattcctattggaagtgcagttgtctcagtgatgcaaacagagtgtttgaagaatgttcttctggtgacattatagcttgtacatccatgatcacagcattttcacagtgtgaccatggtaagggtgcaataaagctgttcatggaaatgctaaggaaggggcttgagccagatcctttcgtgctaagtagcttactgaatgcttgtgctagcttatcagcttatgagcaagggaagcaagtccatgctcatctgatcaagcgacagttcatgtcagatgcgtttgcagggaatgctcttgtgtacacttatgctaagtgtggtagcatagaggatgcagakttggctttctccagcctgccagagaggggagttgtctcatggtctgcaatgatcggagggctagcacagcatgggcatgggaagagagcattggaattgtttggcaggatggttgatgaaggcattaatccaaaccacatcaccatgactagtgttctctgtgcttgcaaccatgcaggacttgttgatgaggccaagcggtacttcaattcaatgaaggagatgtttggcattgacaggacggaggaacattactcatgtatgattgatttgcttggccgtgctggtaaactagacgatgcaatggagcttgttaacagcatgccattccaagcaaatgcctcaatttggggggcgctactaggagcctcaagagtacacaaagacccagaactgggaaagctggcagctgaaaagctcttcatcctagagcccgagaaatctggtacacatgttctgcttgcaaacacttatgcatctgcaggcatgtggaatgaggtggctaaggtgcgaaagctaatgaaagacagtaacatcaagaaggaacctgccatgagctggattgaggttaaggacaaggtgcatactttcattgttggtgacaagagccacccaatgacaaaagagatatatgcaaagctagttgaattgggagatctaatgagcaaagctggttttgttccaaatgtagatgttgatctccatgatttagacaggagtgaaaaggagttgcttctttctcatcatagtgaaaggctagctgttgcgttcgctttgctcagcactccacctggagcacccattagagtcaagaaaaatctgcgcatatgcagagattgccatgtggcatttaagttcatttcaaagattgtttcgagggaaattatcatcagagacatcaaccgattccatcatttcagagatgggacatgttcttgcggtgattactggtag

SEQ ID NO: 188 - protein, 784 aa, Oryza sativa
  X_region (467)..(467): Xaa = any naturally occuring amino acid
MRAEGVCCNEFALPVVLKCVPDARLGAQVHAMAMATGFGSDVFVANALVAMYGGFGFMDDARRVFNEADSERNAVSWNGLMSAYVKNDQCGDAIQVFGEMVWSGIQPTEFGFSCVVNACTGSRNIEAGRQVHAMVVRMGYDKDVFTANALVDMYMKMGRVDIASVIFEKMPDSDVVSWNALISGCVLNGHDHRAIELLLQMKYSGLVPNVFTLSSILKACSGAGAFDLGRQIHGFMIKANADSDDYIGVGLVDMYAKNHFLDDARKVFDWMFHRDLILCNALISGCSHGGRHDEALSLFYELRKEGLGVNRTTLAAVLKSTASLEAASTTRQVHALAVKIGFIFDAHVVNGLIDSYWKCSCLSDANRVFEECSSGDIIACTSMITAFSQCDHGKGAIKLFMEMLRKGLEPDPFVLSSLLNACASLSAYEQGKQVHAHLIKRQFMSDAFAGNALVYTYAKCGSIEDAXLAFSSLPERGVVSWSAMIGGLAQHGHGKRALELFGRMVDEGINPNHITMTSVLCACNHAGLVDEAKRYFNSMKEMFGIDRTEEHYSCMIDLLGRAGKLDDAMELVNSMPFQANASIWGALLGASRVHKDPELGKLAAEKLFILEPEKSGTHVLLANTYASAGMWNEVAKVRKLMKDSNIKKEPAMSWIEVKDKVHTFIVGDKSHPMTKEIYAKLVELGDLMSKAGFVPNVDVDLHDLDRSEKELLLSHHSERLAVAFALLSTPPGAPIRVKKNLRICRDCHVAFKFISKIVSREIIIRDINRFHHFRDGTCSCGDYW

SEQ ID NO: 189 - DNA, 782 bp, Oryza sativa
  misc_feature (109)..(109): m = adenine or cytosine
  misc_feature (638)..(638): m = adenine or cytosine
atggcgccgtcgtcgacgtcgtcggagggtgcctccgacgagtggttgccacccagccggcggccggagctggcggacgtggtccccgtgacgcaggacgacgggcccmaccccgtggtggccatcgcctaccgggacgagttccgcgaggtcatggactacttccgcgccctctacttcgccggcgagcgcagcgtccgcgccctccacctcaccgccgaggtcatcgaccttaatcccggcaactacacggtgtggcattttaggcgtcttgttctagaggcactggatgctgatctgcgtgaggaaatggattttgtggaccgaattgctgaatgtaacccaaaaaattatcaaatctgtattttctcaggcatcacaagagatggcttgcggagaaattaggaccagatattgcaaataaagagcacgaatttacaaggaagatactttctatggatgctaaaaattaccatgcttggtctcataggcagcagtgggttcttcaagcactgggtggatgggagactgaactacagtattgcaaccagctgcttgaggaagacgtcttcaataattcagcttggaatcaggaagtggattacacagttggggctattctggctactcagaatgamagcccctggagatactcaaagtttgctttgagcttgctgctcgatcttcttcaaattggtttatgctcaatattgcagagatgtgatcccctgcggataaattactggtcctggtacaggaccactatttcttctcaaacctga

SEQ ID NO: 190 - protein, 259 aa, Oryza sativa
  X_region (37)..(37): Xaa = any naturally occuring amino acid
  X_region (212)..(212): Xaa = any naturally occuring amino acid
MAPSSTSSEGASDEWLPPSRRPELADVVPVTQDDGPXPVVAIAYRDEFREVMDYFRALYFAGERSVRALHLTAEVIDLNPGNYTVWHFRRLVLEALDADLREEMDFVDRIAECNPKNYQICIFSGITRDGLRRNGPDIANKEHEFTRKILSMDAKNYHAWSHRQQWVLQALGGWETELQYCNQLLEEDVFNNSAWNQEVDYTVGAILATQNXSPWRYSKFALSLLLDLLQIGLCSILQRCDPLRINYWSWYRTTISSQT

SEQ ID NO: 191 - DNA, 453 bp, Oryza sativa
atgcgcctcgagatgtcacccgacaacctcctcttcttctgctccgtcgcggcgtcggcggccgctggattctgcctcttctcgctgtaccggcggctcgcgcggcggtgccaccaccaccacgcggcgcctgccggaggatcggaagaggaggaggaggagcgccggcggctgaccgcggtggcctccggcctcccggcgttcatgtacgaccggctggtccggcacagcggcaagggcgcgagctggacggagtgcgccgtctgcctcggcgtcatccatgtcggcgccatggtgaagctgctgccggcgtgcgcccacatctaccacgtcgactgcatcgacctgtggctgtcttcccacccgacgtgccccctctgccggtgcagggttgatcatcctgggcaggggcaggagacggccaggcagcttgcccagctttccccagcatag

SEQ ID NO: 192 - protein, 150 aa, Oryza sativa
MRLEMSPDNLLFFCSVAASAAAGFCLFSLYRRLARRCHHHHAAPAGGSEEEEEERRRLTAVASGLPAFMYDRLVRHSGKGASWTECAVCLGVIHVGAMVKLLPACAHIYHVDCIDLWLSSHPTCPLCRCRVDHPGQGQETARQLAQLSPA

SEQ ID NO: 193 - DNA, 1632 bp, Oryza sativa
  misc_feature (168)..(168): k = guanine or thymine
  misc_feature (596)..(596): k = guanine or thymine
  misc_feature (624)..(624): r = adenine or guanine
  misc_feature (690)..(690): r = adenine or guanine
atggcggcgactccggcggcggacagccgcctcctcgtcatatacgcctcggagactgggaacgctatggacgccgccgaacgggtcggccgccaggccgagcgcggcggctgcccggccgtcgacgtcctccccatggacagcttcgaccccgtggtcttcgtcgtktccaccacggggcagggtgatcccccggattccatgaaggttttggggatttgatccgtttggtttgttttggaggtaccttcttaagaagaatttgggtgctaggtggcttgaaggggtcagatatgctgtgtttgggctcggagattcaggctatcagaagtacaattttgctgcaaaaaagctcgataaaaggcttttacaccttggtgcagaaccaatcatacaggtaggcttgggagatgatcaacacccttcaggtatgaaggagctctagatccctggttgctgtctttgtgggaatcactgaatcaaacaactccatcgctgttaccaagaatattcagagagcgcgctcaatgtcccctttgactaaggaaaattctgacagagacgtgcgccactttgaactggaaaatccatcttckatcacttatcaagttggcgacgcgctaraaattctaccaagtcaaagtccatcagctgttgactctttcattgaacgctgtaaattggatccarattgttacataacgatcaagttaaaaacctttgttgctttgacaatggatgtcgcatcagcttcccctcggcgatatttctttgagatgagcttttttgcaacggctgaacatgaaaaggaaaagcttcagtattttgcatctccggaaggaagagatgacctttatcagtacaatcaaaaggagggccgaactattctagaagtattggatgattttccctctgtacaaatgccttttgaatggttggtgcaactaacgcctccattaaagaaaagagccttttccatatcatcatctccattagcaaaaccaaatcaaatacacttgactgttagcatagtgtcatggcgtactcctttcaaaaggatgcggcggggtctctgctcttcatggctggctgggctaaatccaaatgaagataccatgttgggtacaccacggttctttgcctcctccacatccatcgactccacttattcttattggaccaggaactggatgtgcaccattctgtgcatttgttgcggaaagggctgcacagagtacatcagaagcaacagcacccattctattcttctttggctgtagaaatcaagaaaatgattttctatacaaggacttctggtatgctcatgcccatgaccagggggtattgtcctcgaaaaatggcggtggtttctttgttgccttttctagagatcagcctcaaaaagtctatgtgcagcacaggataagggagcagagtgcaagagtgtggaatttactaaagtctggggctgcaatatacattgcaggctcgtctaccaaaatgccagctgatgttacagctgcactggaagaagttatctgtcaagaaaccggttgttcagaagaggaagcctcgatatggctcaggaaactagaaaggaacggcaaatttcacactgagacctggtcatag

SEQ ID NO: 194 - protein, 544 aa, Oryza sativa
  X_region (208)..(208): Xaa = any naturally occuring amino acid
  X_region (230)..(230): Xaa = any naturally occuring amino acid
  X_region (374)..(375): Xaa = any naturally occuring amino acid
MAATPAADSRLLVIYASETGNAMDAAERVGRQAERGGCPAVDVLPMDSFDPVVFVVSTTGQGDPPDSMKVLGIDPFGLFWRYLLKKNLGARWLEGVRYAVFGLGDSGYQKYNFAAKKLDKRLLHLGAEPIIQVGLGDDQHPSGMEGALDPWLLSLWESLNQTTPSLLPRIQRARSMSPLTKENSDRDVRHFELENPSSITYQVGDALXILPSQSPSAVDSFIERCKLDPXCYITIKLKTFVALTMDVASASPRRYFFEMSFFATAEHEKEKLQYFASPEGRDDLYQYNQKEGRTILEVLDDFPSVQMPFEWLVQLTPPLKKRAFSISSSPLAKPNQIHLTVSIVSWRTPFKRMRRGLCSSWLAGLNPNEDTMLXXYTTVLCLPPHPSTPLILIGPGTGCAPFCAFVAERAAQSTSEATAPILFFFGCRNQENDFLYKDFWYAHAHDQGVLSSKNGGGFFVAFSRDQPQKVYVQHRIREQSARVWNLLKSGAAIYIAGSSTKMPADVTAALEEVICQETGCSEEEASIWLRKLERNGKFHTETWS

SEQ ID NO: 195 - DNA, 619 bp, Oryza sativa
atggattgctgccggcgcgtgaacccgttccgcgcctgctcgccgctgcgggggctcgggtacctcatgctggccttcgtggccgccatcgtcgccgtctcctactacgccgtcgtccttgcaatgattatatggtgctacttgatggttgttttcaccgatcctggtgctgtacctgaaaactggagacatgcttctgaagaggatggcatagatggaccatcattgcgtttgggtggtaaattgtgttggggcaaggaactacaaatattttctccttttcctgtatacatttgttgaaacagtgttggatacattggtactacttccttactttattgagttcttccgagatgaagttcttaatttggcatttgcactgagccttctatgtttcattggaatgcacgcatctcttgttacaagtaatacgacttctatagagtggaagtatgacctgggatggagaaaaaacttggagcaggttttcgaggatctgcacaacattggagcacttcatggccttgaattccctactcgatctgatgcagtcgtctgactacatgtacttccaccagcatcttgttcaaaatattccatattgccgactcacttgtag

SEQ ID NO: 196 - protein, 185 aa, Oryza sativa
MDCCRRVNPFRACSPLRGLGYLMLAFVAAIVAVSYYAVVLAMIIWCYLMVVFTDPGAVPENWRHASEEDGIMDHHCVWVVNCVGARNYKYFLLFLYTFVETVLDTLVLLPYFIEFFRDEVLNLAFALSLLCFIGMHASLVTSNTTSIEWKYDLGWRKNLEQVFEDLHNIGALHGLEFPTRSDAVV

SEQ ID NO: 197 - DNA, 573 bp, Oryza sativa
atggccatcaagaggcatctgatggcgcgcaccacggacgtcttcatcgccaccttccccaagtccggcaccacatggctcaaggcgcttatattcatgtcatggaacattgatgtggctgtccggcaattctgcgatggcatctcgcatttcgggccgttttgggagcacgtcctcggctactggcggtggcacgtcgagatgccaagccaggtgttcttcttgacctacgaggagcttgccgctgacacgcttggcctattgagacgtttggccgagttcgttgggcacccgttcacggttgaggagcaagaggctggagtggataggaagattgtggagatctgtgccatggagagcttgtcgaggttagaggtgaatctgtcggggacaactgactttatcgagaaagacgtaccgaacaacatattcttccggcgtggagtagtcggagattggaggaactatctgacaccggagatggcaatgaaaattgatgagatcatcgagatcaagtttgaaggaactggcttgttgtttcatccacagcttttacgacaaaaaggagaatag

SEQ ID NO: 198 - protein, 190 aa, Oryza sativa
MAIKRHLMARTTDVFIATFPKSGTTWLKALIFMSWNIDVAVRQFCDGISHFGPFWEHVLGYWRWHVEMPSQVFFLTYEELAADTLGLLRRLAEFVGHPFTVEEQEAGVDRKIVEICAMESLSRLEVNLSGTTDFIEKDVPNNIFFRRGVVGDWRNYLTPEMAMKIDEIIEIKFEGTGLLFHPQLLRQKGE

SEQ ID NO: 199 - DNA, 408 bp, Oryza sativa
atggctattgtgcatgaagattcatgcattattgtggaaattaaagctagagacctcatcattgatgttgaaggcaagtttctcttactcgccaatgacccaaccgaagaaaaatcgaaatcacatgagatgcaaatcgcgcgggtataccgtggcgtcctcgtaggcgcgttgcacactagtactcctatacggataagaccacctccccatagccagaggcagggaccatggcgacgaaaaagagaaggagaaagaaaagggaaaggagaaaggaaaaaaattgagctggccggtgcggtggccgtggatttggggacagtggcctggatcggcgtggccactgtcccccggccgctcgccgccggcgccggtggcgctagcaaagctgcgtcgtcgaggctgtag

SEQ ID NO: 200 - protein, 135 aa, Oryza sativa
MAIVHEDSCIIVEIKARDLIIDVEGKFLLLANDPTEEKSKSHEMQIARVYRGVLVGALHTSTPIRIRPPPHSQRQGPWRRKREGERKGKGERKKIELAGAVAVDLGTVAWIGVATVPRPLAAGAGGASKAASSRL

SEQ ID NO: 201 - DNA, 156 bp, Oryza sativa
atggccttggaagatgtggctgttcctgatcagcgatggactgatgatgtggcacgccagttgttagatcctaacctcacgtatagagcaagtcatgaggcatgggatatgggcaaagtagatagcatgccgtatgcaacgtcagcatatccctag

SEQ ID NO: 202 - protein, 51 aa, Oryza sativa
MALEDVAVPDQRWTDDVARQLLDPNLTYRASHEAWDMGKVDSMPYATSAYP

SEQ ID NO: 203 - DNA, 2028 bp, Oryza sativa
  misc_feature (297)..(297): m = adenine or cytosine
atggttaattttggaaagaagttgatggctgatcaagtagaagaatggaaagggtatgcttttgtactatattaactacaaattgatgaagaaaatgttgaagcaatacgttcagcagacccaacttggtggaaaagatcgagagcaagtacttaaagagttctcaagaattcttgatgaacagcagattgaaaggattgtactttttctgctacaacaacaaggccaccttgctaataggattgaggaattgggagaacagcgtgctgctcttctagaacagcatgatatatcccmagtttttcaactacgagaggcttatagagaagttgggcgagatcttataaagcttctccgttttgttgatatgaatgctactggtataaggaagattctaaagaaattcgataagcgctttggctataggtttacagactattatgtcaccactcgtgcaaaccatccttattctcagcttcaacaagtctttaagcaagtggctgttgtaggagctttatcgcgcaaccttgcatatctgcaagatcatgaaaatcatgcggtacaaaaacttacacatgcgacgagttttctgcaattcttaggtcaacatgcacttatcatccaagaggacgtgcaaagtgggtcggaggatcttgtcgatgatcaaagttaccatttcatgtctttgatactcaacctagtgaacacctttctttacatggtgaacacatatatcattgtgccaactgctgatgactacgctgtaagccttggagctgcagcgacagtttgtggcgtaatcatcggatcaatggcagttgctcaagtgttctcctcagtttatttcagtgcatggtcaaataggtcatacttcagacctcttgtattcagtagcatcatgttattcgctgggaatctgctatatgcattagcatatgacctgaattctctgacagttctcctgattggccggctactatgcggtgcaggttaggctctgcaagagctgtgaaccgtcgatatatcagcgattgtgtgcctctcaaaatcaggctacaggcctctgcaggattcgtcagtgctagtgctcttggcatggcatgtggccctgctcttgctggtttactccagacaagatttaagatatactcactcacttttgatcagagcacgttgcctgggtgggtcatgtgcattgcttggcttgtttacttgctgtggctgtggatatcattcaaagagccgggacactttgctaagagttcagacacggcacagcctgctgaatctgcaatgctaatctggaggaaggtctagcgcaaccattgcttacaggctcagaagagggacaagaccaaaatgctgaggataatgacgataacgaagaggagtctaaaaattctcacgggccagcaacttcaatcagttcagcatacaaattgttgacaccatctgtgaaggttgtccagctattgatatactttatgctcaagtacgctatggaaatcttgctctctgaatcaagtgtcatcaccacatactattttaactggtctacaagcgctgtggctatctttttagcgattcttgggtgtactgttctccctgtcaacgccattgttggaagctacattacaaatttattcgaggacagcaaattttggtggcatctgaaatcatggtcctcattggtataatcatgagcttccgttacacccctcactactccgttccgcagtacgtcttgtccgctctcatcacatttgtgtttgctgaggtcctcgaagaggagtgaacctgtcgttgctttcacgagtaatgtcgtcgaggctcgcgcgaggaacctacaacggcggcctcctgtcgacagaggccgggacgctggcccgtgtagttgcagacgcgacgattaccgcggcgggttatctaggcccggacctcctgctcaacatcactctgctgccacctcttgtcatctgcatagcctccctcgttgcaacattctgcacatacaacaccctgtactaa

SEQ ID NO: 204 - protein, 675 aa, Oryza sativa
  X_region (99)..(99): Xaa = any naturally occuring amino acid
MVNFGKKLMADQVEEWKGMLLYYINYKLMKKMLKQYVQQTQLGGKDREQVLKEFSRILDEQQIERIVLFLLQQQGHLANRIEELGEQRAALLEQHDISXVFQLREAYREVGRDLIKLLRFVDMNATGIRKILKKFDKRFGYRFTDYYVTTRANHPYSQLQQVFKQVAVVGALSRNLAYLQDHENHAVQKLTHATSFLQFLGQHALIIQEDVQSGSEDLVDDQSYHFMSLILNLVNTFLYMVNTYIIVPTADDYAVSLGAAATVCGVIIGSMAVAQVFSSVYFSAWSNRSYFRPLVFSSIMLFAGNLLYALAYDLNSLTVLLIGRLLCGCRLGSARAVNRRYISDCVPLKIRLQASAGFVSASALGMACGPALAGLLQTRFKIYSLTFDQSTLPGWVMCIAWLVYLLWLWISFKEPGHFAKSSDTAQPAESAMLIEEGLAQPLLTGSEEGQDQNAEDNDDNEEESKNSHGPATSISSAYKLLTPSVKVVQLLIYFMLKYAMEILLSESSVITTYYFNWSTSAVAIFLAILGCTVLPVNAIVGSYITNLFEDSQILVASEIMVLIGIIMSFRYTPHYSVPQYVLSALITFVFAEVLEEGVNLSLLSRVMSSRLARGTYNGGLLSTEAGTLARVVADATITAAGYLGPDLLLNITLLPPLVICIASLVATFCTYNTLY

SEQ ID NO: 205 - DNA, 1023 bp, Oryza sativa
atgagcgctccacgggagcaaagccggcgaggggagaggatgggagggagacttacgggagcacgatcagatgaactccgcgcgcagccgccgccattggtgggtgggagctctcctcctcctcctctcctccgtcgggtggtgtgggcttccgcgtcccacggcccagccaacggcccacctggcccagtcgtcgcttcctctctccgccaaaaatacgctttcgcttcgggcttgcggctgacgggttttatagaatacgcctccggaactggcagaggggaacggaagagtctccttgtagaggttggtagcctaggtagcctctccattcgtcctctttattctgagtctatgacaattgggcccacatgtcagcctctacacctcctttttttctctcacctttctccccttctctccaaaccctccttccctctcccatccgccgccgccgccctatccccatccccaccgccgctcgggctgcgtcgccatccaccgccgccgggggctctacccgccggtgctgctctcttcgctggcggtggtgcggcgatgcgaggaggcgggcggccgcgcgcggtggtgcggcggcacggggaggcaggaggcgagacgccggcggctcgcaacgacgacctcgagccgcttgggaggggccggcaatggagctcggggcggagctcggcggtggcggtgacggtggccggccgcggcgatgacggggcggcggtgcccgactgcggcgacgacggcgccctcgtcacatttgcgtgccgcactgccacgtggagagagagggggaaacaggcgtgggtcccacatatggctagccggttttggctggccaactttggctacatgcgcacgaaaaatgagggagaggggttaggaacaagggttgcaaacaggccggttcatggacggagacctggatgctgtattccagggaccacttatgttcagactgaatttgaagaacccaaacatccaattctttcagaaatttctgcattgtag

SEQ ID NO: 206 - protein, 340 aa, Oryza sativa
MSAPREQSRRGERMGGRLTGARSDELRAQPPPLVGGSSPPPPLLRRVVWASASHGPANGPPGPVVASSLRQKYAFASGLRLTGFIEYASGTGRGERKSLLVEVGSLGSLSIRPLYSESMTIGPTCQPLHLLFFSHLSPLLSKPSFPLPSAAAALSPSPPPLGLRRHPPPPGALPAGAALFAGGGAAMRGGGRPRAVVRRHGEAGGETPAARNDDLEPLGRGRQWSSGRSSAVAVTVAGRGDDGAAVPDCGDDGALVTFACRTATWRERGKQAWVPHMASRFWLANFGYMRTKNEGEGLGTRVANRPVHGRRPGCCIPGTTYVQTEFEEPKHPILSEISAL

SEQ ID NO: 207 - DNA, 657 bp, Oryza sativa
atgaggagacgtcaagctgacgctgctgcctggaatcacgtcttgcgaacgcccacgcccacgcccacgcggacgcagcgggtgatcgccgccgatccgaccccgcgcaaccctctcccgcggccgcgagcgagcagaaccgaatccaatatggctgccttgccattagccacagccgaattatgtgatgcaaatgcacatttgatcatgaatggcgagcttcgtgctctccagcccgtcttccaagtctacggaaggcggcaggttttcgccggccctatcgtgacgctgaaggtctacgaggacaatgttcttgttcgcgagttcctggaggagaagggccaaggcagggttctcgtggtcgatggtggtgggagcctgcggtgcgccattttgggtggcaaccctgtgcagcaggcgcagaacaatgggtgggctggcatcgtcgtcaatggttgcatcagggacgtggatgagatcaatggctgcgacattggtgtccgagctctgaactcgcaccctatgaaagcaaacaagaagggcatcggggagaagcatgtgcctgtgaccattgcagggaccaggatttgcgacggggagtggctctacgccgatactgatggtattctcatctcaaggactgaattgactgtgtga

SEQ ID NO: 208 - protein, 218 aa, Oryza sativa
MRRRQADAAAWNHVLRTPTPTPTRTQRVIAADPTPRNPLPRPRASRTESNMAALPLATAELCDANAHLIMNGELRALQPVFQVYGRRQVFAGPIVTLKVYEDNVLVREFLEEKGQGRVLVVDGGGSLRCAILGGNPVQQAQNNGWAGIVVNGCIRDVDEINGCDIGVRALNSHPMKANKKGIGEKHVPVTIAGTRICDGEWLYADTDGILISRTELTV

SEQ ID NO: 209 - DNA, 636 bp, Oryza sativa
atggcgaggagcatggcgacagtgcacggggagtgcacggagctggccggcctcagtgacggcccgacgcttcctcgtcgtcaccgtcgaaccccatggcggccgctgcctagttcttgccccatcgcccgggccaaggtcctcccccgccgcccgtgcccagctgcaatacgtcgccatcgcccgtggaaaggggaggagagaggaagagaggctgccattgagggaggaggtggcggcgtggtcagggactgcaagacgctagaggcggtggtggtcaaggcggccacgcagtcttcatcgtcgtacctcacggcaaggcctgtgcctgtcttggtgcgtcggggtggcagcggaggcggggcggagcaagtggccgcgggtggtggttggaggcaagatggcgagctcgccagctctcctcccctctcctacgcctccgtcctctcctcatcggctgccgcttgccacgaacgggtccgcgacctcctcctcaccaacctccaactgccacagcagcctctcctcatccgccgcggaacacatggctccctcctcgccgagcacctcccgtcaccactgccttccatgccggccaccgtcgctgcacactcgtttggaacttgggagaagtag

SEQ ID NO: 210 - protein, 211 aa, Oryza sativa
MARSMATVHGECTELAGLSDGPTLPRRHRRTPWRPLPSSCPIARAKVLPRRPCPAAIRRHRPWKGEERGREAAIEGGGGGVVRDCKTLEAVVVKAATQSSSSYLTARPVPVLVRRGGSGGGAEQVAAGGGWRQDGELASSPPLSYASVLSSSAAACHERVRDLLLTNLQLPQQPLLIRRGTHGSLLAEHLPSPLPSMPATVAAHSFGTWEK

SEQ ID NO: 211 - DNA, 1254 bp, Oryza sativa
atggtgcgcggacaaccaggcggggcgaggcgaggtagacagtcgctgctacgctctcgttttgtaacggacggtaataaacaacggagaattgatttcgtatcaatgaacacgccgaaggacggagaagttcttcacgactcttacactttgagttcctcctcctctgttcctgagctgcagaatccttccccggttctgttcacctgcgcacacagtgcttcaagcgcgactgctcttgttcttcgcggctactgctgctgcatcggcgccttcaccaagatgtcaacggagattggagacaagaagatgaacgacatcaacggaggcaatactgccttaaaatccagcggtgggacattttcgggggcgaaggcgacgcggcggcggccaacgcagttcaatgcggcgccgcggcagcacggctgtgctcacggggggaaaggcggcccgacacggcattcaggccgcgtaggtgagaaggagctgtgcggtgctgagcagaggaggttaggggcgcctcctcctcctttcgccaaactgccaggatttggactccacagcgccgtcgcagccgccgaaaaagggcatgaaggggtatgggtcggcgacggctgcacgccctcttcctcgcctccacctcaccaacctcgccgccgcggctgctcccgatttgcggtgcccctcgcgcgccgcccgttgtccaaggccatcacgggcatcgacgacggcgtctcggtgaggaggagtagcggcggctcagcaaggagaaggaggaacggcgtgggcatacacgtagccggcgtcgatgatggcgacgtggggcgagggacgctgctgctctgcctgagagccgaggggagcggccagccggcgcggctcgccaccatcgacaaccgcgtcttacaaaaggctgcacacgtgacaccaactcctccattcccaacctcttcggcttccaccgcaagaatcgcagagcgctctaagagaaaggggagagagagagagagagatccatggcttccaccgtcgctctcaagggccgcccgttcgccaccctcctcaagcagctcctcgccgacgcgccgtccgccgccaccgggaggcccgtcgccactcccgccgcctacgggaggtccgccccgcccccgcctgagggcgcgccgctacgacgtcgtcgacgagtccggcaccgacaacggcgaggagtacgacgccaccgacgacggcgagtgcgacccaaagacccaatag

SEQ ID NO: 212 - protein, 417 aa, Oryza sativa
MVRGQPGGARRGRQSLLRSRFVTDGNKQRRIDFVSMNTPKDGEVLHDSYTLSSSSSVPELQNPSPVLFTCAHSASSATALVLRGYCCCIGAFTKMSTEIGDKKMNDINGGNTALKSSGGTFSGAKATRRRPTQFNAAPRQHGCAHGGKGGPTRHSGRVGEKELCGAEQRRLGAPPPPFAKLPGFGLHSAVAAAEKGHEGVWVGDGCTPSSSPPPHQPRRRGCSRFAVPLARRPLSKAITGIDDGVSVRRSSGGSARRRRNGVGIHVAGVDDGDVGRGTLLLCLRAEGSGQPARLATIDNRVLQKAAHVTPTPPFPTSSASTARIAERSKRKGRERERDPWLPPSLSRAARSPPSSSSSSPTRRPPPPGGPSPLPPPTGGPPRPRLRARRYDVVDESGTDNGEEYDATDDGECDPKTQ

SEQ ID NO: 213 - DNA, 1170 bp, Oryza sativa
  misc_feature (156)..(156): m = adenine or cytosine
atggcttccctcgcctcccctcctctcccctgccgcgccgccgccaccgccagccgcagcgggcgtcctgctccgcgcctcctcggccctccgccgccgcccgcttcccctctcctctcctccgcttcggcgcgcttcccgcgtgccccctgcaamgccgcacgctggagccggcgcgaagccgtgcgggtacaggtttgctctcaagctggtgcagctggaccagccccattatcgaagacattgtcagacctcaaggattcctgctggagatttttacggccacatacaattcgaggaactgccttgggatccatagcattagttgctagagctttgatagagaacccccaactgataaattggtggttggtattcaaagcgttctatgggctcgtggcgttaatctgtggcaatggttacatcgttgggatcaatcagatctatgacattagaatcgataaggtaaacaagccatatttaccaattgctgccggtgatctctcagttcagacagcatggttattggtggtattatttgcagctgcgggattttcaattgttgtgacaaactttggacctttcattacctctctatattgccttggtctatttcttggcaccatatactctgttcctccattcagacttaagagatatcctgttgctgcttttcttatcattgcaacgggtccgtggttttcttctcaactttggtgtgtactatgctactagagcagcactgggtcttacattccaatggagcagctcgcctgttgctttcattacatgcttcgtggactttatttgctttggtcattgctataaccaaagatctcccagatgttgaaggggatcggaagtatcaaatatcaactttggcgacaaagctcggtgtcagaaacattgcatttcttggctctggtttattgatagcaaattatgttgctgctattgctgtagcttttctcatgcctcagcaggctttcaggcgcactgtaatggtgcctgtgcatgctgcccttgccgttggtataattttccagtttttcagacatgggttctggagcaagcaaaatatactaagaggatgctatttcacagtactaccggttcatttggaatctcttctatgctgaatacatcttcttcccgttgatatagaggtaa

SEQ ID NO: 214 - protein, 57 aa, Oryza sativa
  X_region (8)..(8): Xaa = any naturally occuring amino acid
APAPACGXAGGTREARRSGGEERGSGRRRRAEEARSRTPAAAGGGGGAAGERRGGEG

SEQ ID NO: 215 - DNA, 2409 bp, Oryza sativa
atgaggcgttcgccgcgcgcggctgccgcggcggtgctgccggttttgctgccgctgctgctgctgctgctgaattgggcagcggcgccggtgggcgcggcgacggcggcggagacgcgggcgctgctggagttcaaggcggcggtgaccgcggatccgggcccggtgctcgcaaactggacgctgggcggcgacccgtgccgcgacttcggcggggtctcctgctaccccgcgtccggcgccgtgcagcggctgcgcctccacggcgagggcctggagggcgtgctctccccgtcgctcgcgcggctccccgcgctggagtccgtctcgctcttcggcaaccgcctctccggcgtgatcccggcgagcttcgtcggcctcgcggccacgctccacaagctcaacctcagcgggaacgcgctctccggggagataccggcgtttcttggcactttccctatgctgcggctgctcgacctctcctacaacgcgttctccggcgagatcccggcgactctgttcggcgagtgcccccgcctccgctacgtgtcgctcgcgcacaacgcgctcaccggccgcgtcccgccgggcatcggcaactgcgttcgcctcgccggattcgacttctcctacaacaacctcgacggagagctgcccgataaactgtgcgcgccgccggagatgagctacatttctgtccggagcaactcgctctccggcgccattgacggcaagctcgacggctgccgaagcctcgacctgttcgacgtcgggagcaacagcttctccggcgccgcaccgttcggccttctcgccctcgtcaacatcacctacttcaacgtctcctccaacaacttcgccggcgaaatcccgagcatcccgacatgcggcgacaggttcgcctacctcgacgcgtccaggaacaagctcaccggctcggtgccggaaaccatggcgaattgccgcaacctgatgctactcaatttgggggccaatggacagggcctcaccggcggcatccctgcggcgctgtcgcagctgaagaacctgaatttccttgacctctcggagaatgcgctcaccggcgtgatcccgccggagctcggcgacctctccaacctggcacacttcaacgtgtccttcaacaacctcaccggctcaatcccatcttctccattgctgcagcagttcggcccaacggcattcatgggcaatccattcctctgtggtccgccattggaccatgcctgtccaggccggaacgcgaggcgattgggagtgccggtgatagtcgccatcgtcatcgcagccgccatactcgtcgggatctgcatcgtatctgccatgaacatcaaggcatacaagaacaagaggaggagggagcagcagcagcacgacgacgaggaggagatcctcgtctccgacagcgcggcgatcgtgtcgccgggatcaaccgccatcaccggaaagctggtgctcttcaggaagaacagctcggcatcgaggtacgaggattgggaggccgggaccaaggcggtgctcgacaggaactgcctcgtcggcgtcgggtcagtcggcgccgtgtacagggccagcttcgagagcggcgcctccatcgccgtcaagaagctggagacgctggggagaatcacgagccaggaggagttcgagcgtgagatgggcaggctacgtggcctcacccaccccaaccttgtcaccttccatggctactactggtcaccctcgacccagcttcttctctccgagttcgtcgacaatggcagcacattgtacgatcacctccacggcagccgtcgccgtgcgggcccggcgagcaccggcggtgatggcggcggcctgccatgggaacggcggttcaggatcgcggtggcgacggcgcgcgcgctcgcgtaccttcaccatgactgcaaacctcaggtacttcacctcaacatcaaatcaagaaacatcctgctggacaacgagcacgaagcgaagctctcagatttcgggctatccaagcttctgcccgaaccgagcaacctaccaggctacgtggcgccggagctagcgtcgtcgtcgatgagctcgaggcacggcggcgacaagtgcgacgtgttcagcttcggggtggtgttgctggagatggtgacggggcggaagccggtgagcagccgccatggacggcagggcacggtgttggtggtggtcctgcgcgactacgtgagggagatggtggagagcggcacggtctcaggctgcttcgacctgagcatgaggagattcgtcgaggctgagctggtgcaggtgctgaagctgggcctcgtgtgcacctccgagtcgccgtcgcggcggccgagcatggccgaggtggtgcaattcttggaatccattagaggcagttcatga

SEQ ID NO: 216 - protein, 802 aa, Oryza sativa
MRRSPRAAAAAVLPVLLPLLLLLLNWAAAPVGAATAAETRALLEFKAAVTADPGPVLANWTLGGDPCRDFGGVSCYPASGAVQRLRLHGEGLEGVLSPSLARLPALESVSLFGNRLSGVIPASFVGLAATLHKLNLSGNALSGEIPAFLGTFPMLRLLDLSYNAFSGEIPATLFGECPRLRYVSLAHNALTGRVPPGIGNCVRLAGFDFSYNNLDGELPDKLCAPPEMSYISVRSNSLSGAIDGKLDGCRSLDLFDVGSNSFSGAAPFGLLALVNITYFNVSSNNFAGEIPSIPTCGDRFAYLDASRNKLTGSVPETMANCRNLMLLNLGANGQGLTGGIPAALSQLKNLNFLDLSENALTGVIPPELGDLSNLAHFNVSFNNLTGSIPSSPLLQQFGPTAFMGNPFLCGPPLDHACPGRNARRLGVPVIVAIVIAAAILVGICIVSAMNIKAYKNKRRREQQQHDDEEEILVSDSAAIVSPGSTAITGKLVLFRKNSSASRYEDWEAGTKAVLDRNCLVGVGSVGAVYRASFESGASIAVKKLETLGRITSQEEFEREMGRLRGLTHPNLVTFHGYYWSPSTQLLLSEFVDNGSTLYDHLHGSRRRAGPASTGGDGGGLPWERRFRIAVATARALAYLHHDCKPQVLHLNIKSRNILLDNEHEAKLSDFGLSKLLPEPSNLPGYVAPELASSSMSSRHGGDKCDVFSFGVVLLEMVTGRKPVSSRHGRQGTVLVVVLRDYVREMVESGTVSGCFDLSMRRFVEAELVQVLKLGLVCTSESPSRRPSMAEVVQFLESIRGSS

SEQ ID NO: 217 - DNA, 4725 bp, Oryza sativa
  misc_feature (1338)..(1338): s = guanine or cytosine
  misc_feature (1350)..(1350): w = adenine or thymine
  misc_feature (1778)..(1778): r = adenine or guanine
atggcgagcgaaggttcaacgtcggagaaacaggctgcgacgggcagcaaggtgcctgcggcggatcgggggaaggaaaaggaggaaatcgaagttatgctggaggggcttgacctaagggcagatgaggaggaggatgtggaattggaggaagatctagaggagcttgaagcagatgcaagatggctagccctagccacagttcatacgaatatgcgctcagcatggaactacgcgaaagaagtagatttcagagcaataaaagacaatctgttctcgatccaattcaattgtttgggggattgggaacgagttatgaatgaaggtccatggacctttcgaggatgtccggtgctcctcgcagaatatgatggctggtctaagattgaatctgttaatctctatacctacccagcatggatccaaatccatgatctgaaggagaagatcaggacgggtagcattgcaactcagcttgcgcgtagagctaggagcattgttaaattagatgcagcctcggttcggggaagcagtgagggggcccgagtgcgcgtgatgctggatgttcgtaagccgctcacgagggtggtaagtaccactctaaataaaaagaagtggatgttccgcgttatgtatgagaaaatgccgattttttgcggtgtttgtggttttgttgggcatgtcacaaaggagcatggtgatggtgttcacccacccgaagctatacaatacccggataatctgatagcccaagatttcagaagaggcagttggggttttggaggaggtcgaggaagaggaagtggaagaggtcgggagaggaatgattgtaataatagggttggttctgagtcaggcaatcctgaggagatggaggatgaggatatgattgacacggcgagcagtccatccaaagcgatcgcaaagtatactggtggctcttcttctgctaaaaggaggcttgcaattggcgagctgctggggcatgaaacaaagacggatcaactgctgctgatggataagccacatggacgtgcagaaggagacattattggtgaagaagtgagaaatgatgtagatgaaacacgcagcctagaagaagttcaagatctagtctgcatggtacagactcatagctcaaaaatagtgttcctttcggaaactaggcaagaccagttttatgtgagtaatctaaaatggaggttgggtttaaggagatgttttgtggtgaatggcgttggaaaggggggaggtttagccctgttttgggacgagagtttgaaggtggaactcaaatcatataatatgagacacattgatgtcatcatcactgaaccsgaaggagcaagwtggacagcaacctttgtttatggagaaccaaaggcacaaaaccgacatgagatgtggaacctgctcaggcggattagattgaatgcttcagatccgtggttaatgataggagatttcaatgaggctatgtggcaaatagagcatcgatcccgagtgaagcattcagagagacagatgagggactttagagaggttttggttgaatgtgatctacaagacataggttttcagggtgttccctggacctatgataataaccaggcaagcccaaacaacgtcaaggtgcgcttagatcgggcagtagcttcgccggtatggagagctatgtttgaccaagcaaacatcatgcatctaacgactgcttgctctgaccacgtgccactcttgttggagaagggtggaaatatgcagcagagaagacgaagcargattaattgttttgaagcagtatgggaaagagtgaaatcctttaattcgatagaacatgaatcatgggatgatgggggtctggcgaaaaatttgggagatgtcagaacaaagttagcatatactatggagaatctcaaaaggtggagcagagataaaattggaaatataaagaagagcattgaaagatgcagaagagagctagaagaaatgagaatgagaggaagggaagactcagaaccggatgttcacaggctgaaaatttttttgcaggaactgctccatcgcgaagagatttggtggaagcagagatcccggatcacctggctgaaagaaggcgatcggaatactcgctactttcatttgaaagcgtcttggagagcacggaaaaacctgattaagaagctgagaagatcagatggtatgatgtgcagtaaagaagaggagttaggagagatcgcacgcagcttcttccgagatctgtacacgaaggatgaaagccttaatccaggtgagctgttgaatatgtttgaaccaaaaataacagatgaaatgaatggcatgttgacaaagccttttacggatgaagagattagtgacgccttattccagattggtcctctcaaagcaccgggtcccgatggttttccggcacgcttctttcaacgcaattggggtgtcctaaagagggacgtgattgaaggtgtccgagagttttttgaaactggagaatggaaggaaggaatgaatgatactgttattgtcatgattccaaaaacgaatgcaccggtggagatgaaggatttcagaccagtcagcctttgtaatgtgatttacaaagtggtggctaaatgcttagtcaatcggcttaggcctttgttgcaagagattatatcggagacccagagtgcctttgtgcccgggcgtatgattacagacaatgcattagtagcctttgagtgctttcattccatacataagtgtacacgagaaagccaagacttctgtgcgttaaagctggatctttcaaaagcttacgacagagtcgactggggattcttggatggagcattgcaaaagttggggtttggaaatatctggagaaagtggataatgtcatgtgtgacgtctgtaaggtatagtgttcgactgaatgggaatatgcttgaaccgttttacccaacaagaggtttgcgggaaggagacccactcaatccatacctatttctttttattgctgacggcctatcaaatattctgcaaagaaggagggatgaaagacagattcagcctctaaaggtctgtcgctctgctcctggtgtgtcgcacctgttatttgcggatgacagtttgttattttttaaggctgaagtgatccaagcgacgagaattaaagaggcactggatttatatgagcggtgtacagggcaactcattaatccaaaagaatgttcgttattgtttagtgctctctgcccgcaggagagacaagatggaatcaaagctgtattgcaagttgaaagaacatgctttgatgataagtgtctgggactcccaaccccagatggaagaatgaaggctgagcaattccaaccaattaaagagaggtttgagaagaggcttacagattggagtgagagattcctttctttagctgggaaggaagctttgattaaaagtgttgctcaagccttgccgacttatacaatgggagtgttcaagatgccagagcggttttgcgaagaatatgaacaactcgtccggaatttctggtgggggcatgaaaaaggggagaagaaggttcattggattgcctgggagaaacttacaagcccaaaacttttgggtggactgggctttcgggatatccgatgttttaatcaggctctccttgctcggcaagcgtggagattaatcgaatcgcctgatagcttatgcgcacgagttctgaaggcaaagtactatccaaatgggacaataactgatacagcgttcccgtcagtttcatcgccgacatggaaaggaattgtgcatgggctagagttgctaaagaaggggctgatatggaggataggagatggaagtaagacaaagatatggaggaaccactgggttgcacatggggaaaatctaaagattttggagaagaaaacctggaataggcttatatatgtccgggagttaatcgtcaccgacactaaaacatggaatgagcccttaatcagacacattataagagaggaggatgcggacgaaattctgaaaattcgaataccacaacgggaggaagaggatttcccagcgtggcattatgagaaaactggcatattttcagtaagaagtgtttatagattggcttggaaccttgctaggaaaacatcagagcaagcttcttcaagctcggggggagcagatggaagaaaaatctgggataatgtgtggaaagcgaatgttcagccaaaagtgagggtttttgcctggaaattagctcaggacagattggccacttgggagaataaaaaaaagaggaagattgagatgtttggaacctgcccaatttgcggacagaaggaggagacggggttccatgcaacagtggagtgtacgctggccaaagcgttgcgagcttcattgagagaacattggacactgccagatgaaagcttgttttcaatgacaggaccagattggcttctagttctgctagacagactaagcagtgaaaagaaggcccagttgcccgcccgaaaacacatggaagacatcaaggggaaaggacctatgtttcaggatccatgtcagaaagagcagacatgtcagttgaatgcagagaaagaaaagtggagttgcccgcctgatggaagtgcaaagctcaatgtggacgcagcttatagaactgaaacaggcgaagcaagcgctgggattatcatcagagattgcaggggctag

SEQ ID NO: 218 - protein, 1574 aa, Oryza sativa
MASEGSTSEKQAATGSKVPAADRGKEKEEIEVMLEGLDLRADEEEDVELEEDLEELEADARWLALATVHTNMRSAWNYAKEVDFRAIKDNLFSIQFNCLGDWERVMNEGPWTFRGCPVLLAEYDGWSKIESVNLYTYPAWIQIHDLKEKIRTGSIATQLARRARSIVKLDAASVRGSSEGARVRVMLDVRKPLTRVVSTTLNKKKWMFRVMYEKMPIFCGVCGFVGHVTKEHGDGVHPPEAIQYPDNLIAQDFRRGSWGFGGGRGRGSGRGRERNDCNNRVGSESGNPEEMEDEDMIDTASSPSKAIAKYTGGSSSAKRRLAIGELLGHETKTDQLLLMDKPHGRAEGDIIGEEVRNDVDETRSLEEVQDLVCMVQTHSSKIVFLSETRQDQFYVSNLKWRLGLRRCFVVNGVGKGGGLALFWDESLKVELKSYNMRHIDVIITEPEGARWTATFVYGEPKAQNRHEMWNLLRRIRLNASDPWLMIGDFNEAMWQIEHRSRVKHSERQMRDFREVLVECDLQDIGFQGVPWTYDNNQASPNNVKVRLDRAVASPVWRAMFDQANIMHLTTACSDHVPLLLEKGGNMQQRRRSRINCFEAVWERVKSFNSIEHESWDDGGLAKNLGDVRTKLAYTMENLKRWSRDKIGNIKKSIERCRRELEEMRMRGREDSEPDVHRLKIFLQELLHREEIWWKQRSRITWLKEGDRNTRYFHLKASWRARKNLIKKLRRSDGMMCSKEEELGEIARSFFRDLYTKDESLNPGELLNMFEPKITDEMNGMLTKPFTDEEISDALFQIGPLKAPGPDGFPARFFQRNWGVLKRDVIEGVREFFETGEWKEGMNDTVIVMIPKTNAPVEMKDFRPVSLCNVIYKVVAKCLVNRLRPLLQEIISETQSAFVPGRMITDNALVAFECFHSIHKCTRESQDFCALKLDLSKAYDRVDWGFLDGALQKLGFGNIWRKWIMSCVTSVRYSVRLNGNMLEPFYPTRGLREGDPLNPYLFLFIADGLSNILQRRRDERQIQPLKVCRSAPGVSHLLFADDSLLFFKAEVIQATRIKEALDLYERCTGQLINPKECSLLFSALCPQERQDGIKAVLQVERTCFDDKCLGLPTPDGRMKAEQFQPIKERFEKRLTDWSERFLSLAGKEALIKSVAQALPTYTMGVFKMPERFCEEYEQLVRNFWWGHEKGEKKVHWIAWEKLTSPKLLGGLGFRDIRCFNQALLARQAWRLIESPDSLCARVLKAKYYPNGTITDTAFPSVSSPTWKGIVHGLELLKKGLIWRIGDGSKTKIWRNHWVAHGENLKILEKKTWNRLIYVRELIVTDTKTWNEPLIRHIIREEDADEILKIRIPQREEEDFPAWHYEKTGIFSVRSVYRLAWNLARKTSEQASSSSGGADGRKIWDNVWKANVQPKVRVFAWKLAQDRLATWENKKKRKIEMFGTCPICGQKEETGFHATVECTLAKALRASLREHWTLPDESLFSMTGPDWLLVLLDRLSSEKKAQLPARKHMEDIKGKGPMFQDPCQKEQTCQLNAEKEKWSCPPDGSAKLNVDAAYRTETGEASAGIIIRDCRG

SEQ ID NO: 219 - DNA, 774 bp, Oryza sativa
atggcggcggcggggctggagtcggcgtgggagtacctcatcacgcatttcagcgagttccagctggcctccatcggcaccttcctcctccacgagagcgtcttcttcctctccggcctcccctctctcctcttcgagcgcctcggcctcttctccaagtacaagatccagcagaagaagagcaatacacccgattaccagaacagatgtgtagtgcgtctcgttctctaccatgtctgcgtcaatctccctctcaccattttatcatatcgcaccttcaaattcatgggcttgaggagcacccttccgctgcctcactggcaagtgctcttcttttttgtgcttgaggatttcatattctactgggggcataggaaatggctgtaccagcatgttcacagcgtccaccatgatatgccacaccctttggcctaacatctgaatatgctcaccctgctgagattctattcttgggctttgctaccgtggccggccctgcccttactggccctcacctcttcactctctgggtgtggatggtcttgagggtcttggagacagttgaggctcacagtggctaccacttcccatggagcccgtccaatttcttgccattgtatggcgggctgaattccatgactatcatcaccgtgttctctacaccaagtctgggaattactcgtcgaccttcatctacatggactgtttgggactgataaagattaccgcaagacaaaggccctagaggagaaagaaaggacgaagcatctgtaa

SEQ ID NO: 220 - protein, 248 aa, Oryza sativa
  X_region (139)..(139): Xaa = any naturally occuring amino acid
  X_region (210)..(210): Xaa = any naturally occuring amino acid
MAAAGLESAWEYLITHFSEFQLASIGTFLLHESVFFLSGLPSLLFERLGLFSKYKIQQKKSNTPDYQNRCVVRLVLYHVCVNLPLTILSYRTFKFMGLRSTLPLPHWQVLFFFVLEDFIFYWGHRKWLYQHVHSVHHDXATPFGLTSEYAHPAEILFLGFATVAGPALTGPHLFTLWVWMVLRVLETVEAHSGYHFPWSPSNFLPLYGGXEFHDYHHRVLYTKSGNYSSTFIYMDCLGLIKITARQRP

SEQ ID NO: 221 - DNA, 494 bp, Oryza sativa
atgtgcaggagctcagggcgcatactttcggttcctttggattccaaaattccatccaaggaatgcctgcttcgtttgatgtctaagatcctcggctaccatgtcgttgctgcatccgctattggcaagctccctcagtttgagcttgaggttgtcggctacacaattgctctagcatattgtattcataaaggactgccattttctgcgtatggggaactagcttttctgttaatccaaggcaattattttggttgcaatcatttactattactccccaccaatgggaaccaagacatggatgaaagctttactgtatgctccaacagtattgggtgggaaaattgaccctgctctttttgaagtcctctatgcttctcagcatgctatcttcttctttgctaggcttccacagatatggaagaattttatgaacaagggcactggcgagctgagctttctgacctgtttcatgaactttgctggttccatag

SEQ ID NO: 222 - protein, 164 aa, Oryza sativa
MCRSSGRILSVPLDSKIPSKECLLRLMSKILGYHVVAASAIGKLPQFELEVVGYTIALAYCIHKGLPFSAYGELAFLLIQGNILVAIIYYYSPPMGTKTWMKALLYAPTVLGGKIDPALFEVLYASQHAIFFFARLPQIWKNFMNKGTGELSFLTCFMNFAGSI

SEQ ID NO: 223 - DNA, 1539 bp, Oryza sativa
atgaaatttgctgaagggtccgagcatgagaatttgccaatagaatctgatcttgatggatcgaacaacaataacaatggtcaagaaagcagctgtgctgggaatatctatgagggttgtaatgaaccagccaaagaagttgatggcagaagtctgtctgttagtggtgacctgcactctgccaacgaaactactatcccgaatttagagccacctgaaatacgtgctgaacaagagaaagataatgcaaccatcaagtgtgatcttccatgtgaaggatggttgaaaaggaaatcaaattgtctttctcaccgtatgaaaggagtgacgacagtctgcactattgtggcagctggtgctttgatgggctttgttataataggtcagaggtggcagcaggacaaattgcaccttcatcattttcagttcaatatcggcactgagggcgtcaacagaatcgttggaatattcagccgttgtaaggatgcgcttcccagtagtcagcagctcaagtctctgcttccgactcgcgtgctccctcaagagccaaaaaaatttttggaaactaaactcagtccaaagagaacgcagaaggaacgccttctggcttccgatactttttatttgacgacaagaggggatctaaacactgttgtcgttcggacttgggactcgggaagagaagcatgcagcaacgtcaaaagccaaaagaaagagaaaaggcacaatcggttgacacgcctggacgtactggtagtctgccattgccaaatgaaggctcttgttggagaagatgactccgccaccgtacatctccctgcgtggagcagctcaggctgcctcgcctttcttcctgcatcctgctgctgcagcctgtggtgcaccatgcatgcgtcacgaatccgcggctcagatgacgctacagtggcgagtgatggccgcagcaacgagaaaggggcaaagaccacagtccaattgcctccatcaagcagaggagagaccaaagacgcctctcgcgtcaccctccccaatgggcaacccacctcgccgccgctcaagcatttgaaaagccacgtggccgtaaggacggtggtggcttgccaggccatggcgacagcgacagtgacggtggaggagatgaaacggcgacgacggcaacccagcggtctcgacgcggcgcgagccttccttgctggtgctggacgtgacggcttggtctgtgtggtgagcgtctggcctctacccggatttggggtgagagcgtcgtacttcggtggacgttccagtgccacgacatttggacggcgggagctttgtgatagagggtatcattggcatggtgcggagggtggcaaggtggcaaggcgacgacaaaacggtctggtggcccgatgtgacgcgagcaacgggattgtggaggagtcggcggttgctctgttaggaggggagctccggtatttcgacatgccccaatccatgcttttgtcctcttgcaacggcgcctttacccacaaaagatggcctcgtcgggcgggctag

SEQ ID NO: 224 - protein, 512 aa, Oryza sativa
MKFAEGSEHENLPIESDLDGSNNNNNGQESSCAGNIYEGCNEPAKEVDGRSLSVSGDLHSANETTIPNLEPPEIRAEQEKDNATIKCDLPCEGWLKRKSNCLSHRMKGVTTVCTIVAAGALMGFVIIGQRWQQDKLHLHHFQFNIGTEGVNRIVGIFSRCKDALPSSQQLKSLLPTRVLPQEPKKFLETKLSPKRTQKERLLASDTFYLTTRGDLNTVVVRTWDSGREACSNVKSQKKEKRHNRLTRLDVLVVCHCQMKALVGEDDSATVHLPAWSSSGCLAFLPASCCCSLWCTMHASRIRGSDDATVASDGRSNEKGAKTTVQLPPSSRGETKDASRVTLPNGQPTSPPLKHLKSHVAVRTVVACQAMATATVTVEEMKRRRRQPSGLDAARAFLAGAGRDGLVCVVSVWPLPGFGVRASYFGGRSSATTFGRRELCDRGYHWHGAEGGKVARRRQNGLVARCDASNGIVEESAVALLGGELRYFDMPQSMLLSSCNGAFTHKRWPRRAG

SEQ ID NO: 225 - DNA, 2475 bp, Oryza sativa
atgcgtgcggcggcggcggcctccaaggcggcggggaaggagaagagcaggaggaagggcggcggcggaggagcaggaggaggaggaggcgagcagctgctcaccgaccaggtcctctccctccgcgcccgcctccacctcgccctcgcgctcggcctcgccaagtctgatggaggtccaaagaaatggcagtctactgatgctggaatacagtctcatgtgctcaaagcagcatcagcctttcttggctgtttgaccaatgagatgctgcggcttcctcctataaaggagtcaatttcggatatactcatagcactggaaggtattcttcagtccaagaatgtgtcggttctgatccaagcaactgatgttagcttgaagttagtttccagtgtaggaaatttagctcgccaatacccggttttagagatcgttacatgcctcgcgagtcagctttctgcaaaccagataactatagctgtctcatctgcaagtacattgaactgcatactgaacaccctagcaacagcgagaagttcgattcatgcagaaatttgggaagctttggagaaaaccgatgcagttacaagtgtcattggagctctgcagaattactcccctgatgtccatccattaaactatctgatggaaatgatgtctctgctaagaattatactgtggatttggccttcttcgagataccatgtatggagtaactgcaacttgatggggaagctagcacaatactgtgttgcctctgaaatggatgttgctgttagagtcctcaagctatatgctgctttagctttatgtgggaatggtgcaatggtccttctgaataatgaagacttgatggctaaggttggtgcgcttttggggaagtcaaatccatctattgctagaattgaagcattgaaattctatcagattcttttgattcttactggtggctgcacctcttcacataaagccaatcagattttgtgccacgacaagctttttaatatggtttccgagaactttatggatatacattcttatgtgtgggatatacttggaaatctagcagtacattgcaaaaatgagtatctctctgttaggaaagggcaagactctgccttgcaggcactaatacattgtatttgctcacttgcagcagatgctatgcagaaaagcaacaccatgaaattatccaaggatgtgcatgagccagctttgagggctgttctgatgatgcttctctcacccagtggatacattttgtctgaggcaagttctaaactcttacatgttttacctttaggtgatgactgtttgaatattctgttcacgtcgttagaatcaaatactacaagaagcattactgcatcttttgacaatgtcaaaattatgtccaacctcatgagcctagcgggcatgagcatcaattttgtttgtatccactgtaaaaggaatttggatgtggggattgtgtgcaatgattgcagagatcattatagtgaaggtctgattagagttcttcaaaatgcgtcatgtcaaaacttgagcccaggaccgaagttgtacatttcacgtatactgagtttgtttggcctatgcggttttccaagcaagttgggaggaaagatgagaagggccttagatgataatgagctagctgatctggaactgttgctttcaaatggtgaatctttaaaagctcatacagccatcatttcagtaaggtgtccaaagttgttgccatctgcaaaatcccttggtagtgatggaaaaattactgatgaatggggcagatcattttatcatgttcgaatgtctgatcgtgttgatagttgtggcttgaagaaaattttggaatacacatacacaaattctgtcatggtagatgatgacaacattaagccagtaaggacacttgcgaagtattgtcacttgaaatcattacaagagatgcttcaaaaagagcagcctaggtggaactctgattgtcctagatatgatcttactgcagcacttgaaccagttaaatgttcattctccttctcagaagttatcaatgttccactggggtggcaagcgctgaacaaactgatccactggttctactcaggcgagctacccaagatcgaccccgattgccgatggcgaaacctgaacagcgaggagcagctttctcagctgcggccttacgccgagctgtcatccctgtctgaattctggttcctggagggagtgaaggaggagagcctgtcagtggtcacctcctgcctgagttccaccagcacggccgcctccgtcgagttcgtcgtcttcgcggcgcagctgggtcagtgggagatggtggaggccgccgtcggcagcgtcgcccatctgtaccccaagctgcgggactccggtcagctggagcagcttgatgatgatgtgctcaacatgctgcggacagagtatgtcaggtattcactgcaccggcggtag

SEQ ID NO: 226 - protein, 824 aa, Oryza sativa
MRAAAAASKAAGKEKSRRKGGGGGAGGGGGEQLLTDQVLSLRARLHLALALGLAKSDGGPKKWQSTDAGIQSHVLKAASAFLGCLTNEMLRLPPIKESISDILIALEGILQSKNVSVLIQATDVSLKLVSSVGNLARQYPVLEIVTCLASQLSANQITIAVSSASTLNCILNTLATARSSIHAEIWEALEKTDAVTSVIGALQNYSPDVHPLNYLMEMMSLLRIILWIWPSSRYHVWSNCNLMGKLAQYCVASEMDVAVRVLKLYAALALCGNGAMVLLNNEDLMAKVGALLGKSNPSIARIEALKFYQILLILTGGCTSSHKANQILCHDKLFNMVSENFMDIHSYVWDILGNLAVHCKNEYLSVRKGQDSALQALIHCICSLAADAMQKSNTMKLSKDVHEPALRAVLMMLLSPSGYILSEASSKLLHVLPLGDDCLNILFTSLESNTTRSITASFDNVKIMSNLMSLAGMSINFVCIHCKRNLDVGIVCNDCRDHYSEGLIRVLQNASCQNLSPGPKLYISRILSLFGLCGFPSKLGGKMRRALDDNELADLELLLSNGESLKAHTAIISVRCPKLLPSAKSLGSDGKITDEWGRSFYHVRMSDRVDSCGLKKILEYTYTNSVMVDDDNIKPVRTLAKYCHLKSLQEMLQKEQPRWNSDCPRYDLTAALEPVKCSFSFSEVINVPLGWQALNKLIHWFYSGELPKIDPDCRWRNLNSEEQLSQLRPYAELSSLSEFWFLEGVKEESLSVVTSCLSSTSTAASVEFVVFAAQLGQWEMVEAAVGSVAHLYPKLRDSGQLEQLDDDVLNMLRTEYVRYSLHRR

SEQ ID NO: 227 - DNA, 891 bp, Oryza sativa
  misc_feature (202)..(202): y = cytosine or thymine
  misc_feature (338)..(338): y = cytosine or thymine
  misc_feature (347)..(347): y = cytosine or thymine
  misc_feature (442)..(442): y = cytosine or thymine
atgccgtgcgggcctccttactcgcgcacgcgaaatccacaatcccactccttaactctcccactcctctcctcccactccagtactccactccttctctcctcccggcctctcctctcctcacagcagcgacaacggtggcgccgggagacagcgcgcgcgcggcggcccttccctccctctaccttcggctcccctcccytcccctcccctcccttcccttgcagatccggcagaggggaggcatgggggcggcggatccggcggcgggcgcaggcgaaggcgacagctgcggcggcgggcgtaggcggaggcgacagcggcgacggcacggcccytccctcccytccccttcctcccctcgcaggcggaagggaggcatgggggcggcggtcgatgatggtggtgagcggcgcctccctctctctcccttcggctcccytcccttcccctccctatccttgcagatccggcagaggggagggatgggggcggcggatccggcggcgggcgacgacggtggcgagcggcccctccctccccttgcagatccggcggaggggagggaagggggcggcggatccggcggcaggcgacgacggtagcgagcggcccctccctccccttgcagatccgtcagaggggagggatatatgggggcggcgggcgcaggcggaggcaacagtggcggcgacggttgacgacggtggcgcgcggccactccctcccctccccttgcagatccggcggaggggaggggtgtcttcggccggcgacgggagcgggcggcggatccggtgtgggaagcgggcgacggcgacaacgcggggttccagacggtcgaaaccaccacacgcgaaaatgagtttccaccgcacgcgaaaatcgtga

SEQ ID NO: 228 - protein, 296 aa, Oryza sativa
MPCGPPYSRTRNPQSHSLTLPLLSSHSSTPLLLSSRPLLSSQQRQRWRRETARARRPFPPSTFGSPPVPSPPFPCRSGRGEAWGRRIRRRAQAKATAAAAGVGGGDSGDGTARPSRPLPPLAGGREAWGRRSMMVVSGASLSLPSAPVPSPPYPCRSGRGEGWGRRIRRRATTVASGPSLPLQIRRRGGKGAADPAAGDDGSERPLPPLADPSEGRDIWGRRAQAEATVAATVDDGGARPLPPLPLQIRRRGGVSSAGDGSGRRIRCGKRATATTRGSRRSKPPHAKMSFHRTRKS

SEQ ID NO: 229 - DNA, 1506 bp, Oryza sativa
atgagccactacacaatgcatgcgcacatcaactacaccgccctgccgccgacgtcgccgctgcagctcccgcttccgtacctcccgccgcctcctccgccgccgcagccgccattgctgcagctccagccgccgccgccgccgtcgtcgccggtgtcatttgacacggcgttccagagcaggatcagccctagcatcctgctgataatcttgatcttggctgttattttcttcgtctccgggctcctgcatctgctcgtccggttcatcctccgcccggcgccgcgtgacgccggcgacgccgacagcggcgacgcgaacgtgaccgccttccaggggcagctccagcagctgttccacctccacgacgccggcgtggaccagtccttcatcgacacgctgccggtgttcctctacggcgccgtcgtcggcgccggcaggaaggacccgttcgactgcgcggtctgcctctgcgagttcgccgacgacgaccgcctccggctcctccccaagtgcagccacgccttccacgtcgactgcatcgacacgtggctgctgtcgcactccacctgcccgctctgccgccgcagcctcctcgccgacttctccccctacggcggtggctgcagcccgctgctgttcgtgctcgagtccggctcggagggctccatctccgatcgcctcgacgcggcgtcgtcggctcatctcagcctcgtcatggagcaggaggaagaagcagagccggaacagaagcatgcagaggcggcggagaaggcggacgaggtggtcgtctccgtcaagcttggcaagtttcggagtcaggccaccgaagtcgccgccggcggcggctgcggcggcagcagcagcgccaaccccgagcaggacgtgcggcgttgctactccatggggacgtacgagtacgtcatggacgagaggtctctgctccgcgtcgccgtgaagccgccggccaagaagcgccccacgacgcagatgccgggccaccgggtcgccatgtcggagtgcgactgccactccaagcgggagagcttccgcggcctcgacgcgctgcccggcggcaagctcgcgcaggcgcagccgccgaagccgccggccaaggtggggaagaaggagagcttctccttctccaagatatggatgcgcggcgcgccgcggatcaggaaggacggcgcgtcctcccggcgcgcgtcgtcgttccggctctcctccgtgctgcagcgcgcggcgagcgacgtcggggcaacggcggcgccgaagccgctgcgcccggacgtcgtgagccccgtcacggagtcggagtacaacgtgtcggcgtgggacaagagcgagaagagcgcgagcggcagcgtcgcggactgggacctcgagtccgccgccgccacggcggccgtccccggcgcaggcgccggcaacgggctcagctcgagggccgacgaggcgccgtcgttcgcgcggcggacgctgctgtggatccgaggacacctgtga

SEQ ID NO: 230 - protein, 501 aa, Oryza sativa
MSHYTMHAHINYTALPPTSPLQLPLPYLPPPPPPPQPPLLQLQPPPPPSSPVSFDTAFQSRISPSILLIILILAVIFFVSGLLHLLVRFILRPAPRDAGDADSGDANVTAFQGQLQQLFHLHDAGVDQSFIDTLPVFLYGAVVGAGRKDPFDCAVCLCEFADDDRLRLLPKCSHAFHVDCIDTWLLSHSTCPLCRRSLLADFSPYGGGCSPLLFVLESGSEGSISDRLDAASSAHLSLVMEQEEEAEPEQKHAEAAEKADEVVVSVKLGKFRSQATEVAAGGGCGGSSSANPEQDVRRCYSMGTYEYVMDERSLLRVAVKPPAKKRPTTQMPGHRVAMSECDCHSKRESFRGLDALPGGKLAQAQPPKPPAKVGKKESFSFSKIWMRGAPRIRKDGASSRRASSFRLSSVLQRAASDVGATAAPKPLRPDVVSPVTESEYNVSAWDKSEKSASGSVADWDLESAAATAAVPGAGAGNGLSSRADEAPSFARRTLLWIRGHL

SEQ ID NO: 231 - DNA, 1926 bp, Oryza sativa
atgttttggaaaggaaacaggttgatgaagttggtcaaagggagcaaggtggaggtgttgcaggaagcggaggtgcccctaggttcttggaggggtgctgagattgtattaggcaatgggcagagcttctatgtgagatatgatccttctccagttgactcttgcgccgctgtcgagagggtgcagagaaggttgataaggccttgcccccctcgagacgattcagtatgctgggctgtgggcgacatccttgaggcctttgatagctactcatggaagattgctgagatggattctacaaagtgcttcggtggttcattcagaggtcaaccaaaatctggaaatcttggaagcaattttggcaagcaaaggcagccatattgtgcaatggacaacaatcttctactgaagaaccaaaaagctttggagggtgataagtctagaggcatgaagagaaaatcatctgctattacacacccaacccagtgcagtgaagtgactagaggcatgaagagattacagacaccccatagagatggaaggcacgcagcgctggttgctggagtttctcctcgtttggctgaaaaggtagatgctgttgattccccatgcttaatgctgggtgaaaaatacatgcatgcttccttaaataagagaaaaaatggtgttcatacaactaacttggctggggtaaatgtggatactgaaaataaattccgtcctttaacaagtgcttatcctagtgacaccgagagtatctcatcctctgttggtagttgtagtccaagcagtagtccctgtagttcacgacacttttactcagcctaccaaactggtgatatctgtagtagaactgatggtgctgaagctgccgtatctgaaagagaaacatctcaacatgataagattataccaaaggaagatacccatttgctggagttgcatgcttatcgtgcaacaatgttggcattgtatgtttgtgggtcaattagctgggagcaggaggctttgttgactaatctaaggcttacactgaacatatcaactgatgaacatctagctgagttgaggaggccgaagtcggaggcttgtaaagcatccttctgtaggtccatgtcgatggaggagtctgccacatggtttgctaaattacagagggatcttcaatctgaatatgacctgcaaagactttgtaagaggccttatttcaaggagagagtgtgcagtcagctcaactttcctatgcagataagttgtttgcagtatgaaaagcagggaaaatttccaaaagattactggtggtgtcactttgtcaacaacaactacttgtgttactggtggtcaataccttcaagaactcacatgcttcacaaggactcaggaggttctcacgcaaaacgtgtgtcatggttgcacgcatttgacaagttcccttttcagaagaagcattatatggtgcacctggtgttttcagatgagcaaagaaaataccgtgtgttgtttgatgtgctctgcattgggtatcaacatcatgaaacggaatcatccacagaagcagagcagagaatcagagagtacaaacggatcatcaggcgacgcagacactttcaggtttccactcaaggcaagcaacatgtactacaatgttctccatttccgcataaaaaagtccaaaaacgatttcaaggacagcagaggccggccatccatcctgtcctggcaagattctgcaagaaagaatcaatgaagccaagccaagccactgcttttatcagcttatggggctcgtggattctccacgccaagtgcatgggcatgagagatggagccatggctgacgacgacgatgatcctgagcactggaacaaaagcgtaccagacgctgcctctgcctgcattgatgctgcgagatcgatgatgcagtga

SEQ ID NO: 232 - protein, 641 aa, Oryza sativa
MFWKGNRLMKLVKGSKVEVLQEAEVPLGSWRGAEIVLGNGQSFYVRYDPSPVDSCAAVERVQRRLIRPCPPRDDSVCWAVGDILEAFDSYSWKIAEMDSTKCFGGSFRGQPKSGNLGSNFGKQRQPYCAMDNNLLLKNQKALEGDKSRGMKRKSSAITHPTQCSEVTRGMKRLQTPHRDGRHAALVAGVSPRLAEKVDAVDSPCLMLGEKYMHASLNKRKNGVHTTNLAGVNVDTENKFRPLTSAYPSDTESISSSVGSCSPSSSPCSSRHFYSAYQTGDICSRTDGAEAAVSERETSQHDKIIPKEDTHLLELHAYRATMLALYVCGSISWEQEALLTNLRLTLNISTDEHLAELRRPKSEACKASFCRSMSMEESATWFAKLQRDLQSEYDLQRLCKRPYFKERVCSQLNFPMQISCLQYEKQGKFPKDYWWCHFVNNNYLCYWWSIPSRTHMLHKDSGGSHAKRVSWLHAFDKFPFQKKHYMVHLVFSDEQRKYRVLFDVLCIGYQHHETESSTEAEQRIREYKRIIRRRRHFQVSTQGKQHVLQCSPFPHKKVQKRFQGQQRPAIHPVLARFCKKESMKPSQATAFISLWGSWILHAKCMGMRDGAMADDDDDPEHWNKSVPDAASACIDAARSMMQ

SEQ ID NO: 233 - DNA, 2058 bp, Oryza sativa
  misc_feature (56)..(56): m = adenine or cytosine
  misc_feature (66)..(66): w = adenine or thymine
atggagagttcatatacgatggtaggcaaaagcattactgtggtggatctgaagcmataccacgcwtttgaccgtgacaaagtttcgttgccagaggttaagggtcatctaaaggaccattgtgcagttgaggaaccaatgcttttgcattggttgttcccaatgaaagaactgaaggatggtcttcgtgttttgttggatgacaaggctgctaaaatttttgaagtggatactaaagggaagaagcctgttatgatagtaacatcaataccagataagactcagggacaaattgagtcactgagacaatgccataatcttgctaagaaggacaaggaagaggcacaagtggtagcacataatgatcagttggttccttatagtgctgaaaaggacagtgatggtcagttgatcactaaaaggagtaagtatccaaggttcagaggtagtagtagcagcactccgacttttactctaggccagctatttgattgtaagaaagagttcaaggatgcagttataaaacatgcattagccaacagaaggtatgtgaagtttgtaaaggatgagggtgatagagtcagagcaaaatgtgagtggaaattgtgtccttgggtctgtcttcttaaaaagacaagtaggaccaatagttggcaaatcacaagctttactgatggacacacatgccctcagaggaaagataatccaatggtaacatcaacaagaattgcagagaagtatgagaagatgattagagataacccaacatggagtatcaagaatatgatttctactgtttctgaagaaatgtttgcaaatgccagcgttcctcagtgtaagagagcaaaggcacatgttctgaagaaactttatgatgcaacaaggtgtgagtattcaaggatatttgactaccaacttgagctactaagaagtaacccaggcagtatagtagtagtcactcttgatagtgatagtccaactcctgtgttccatagaatctacgtatgccttaatgcttgtaagaaaagattccttgctggttgtagaagagttgttggactagatggttgctttttcaagggatcaaccaatggtgagttactatgtgcattagggagggatgcaaataaccagatgtacccaattgcttgggcaatagtggagaaagagaccaatgactcatgggactggttttgtgctttgctatttaaagatcttgttgctggtgatggtgatggttgggtggtcatatcagatcaacaaaagggaattattaatgctgttgagacctggatacctaaagctgagcatagaaattgtgctaggcacatttatgccaattggaggaagaagttcaagaatagggaatggcaaaaaaaaattttggaggctaggtttctgcctataatcagtatgcttgaagctatcagaagaaaagtcatggttaggatacatgagcataggaccaaaatggagaagtggataggaccaatatgtccaaacatacttaagaaactcaatgcttatgttacagaatatggattttgccatgcaatttcaaatggaaatgacaaatttgaagtgaaacatcatgaacaaaggttcacagtcaatcttcaaagcagaacttgctcttgtagatattggcagttagcagagctcccttgctgtcatgctattgcttgcatccactacaaaaccaatagccttgatgaatatattgcctcctgctactcagtgaaagcattcatgtcaacatatgaacattgccttgagccagtggaaggcattcatagctggccagtatctaagagacccaagcctgctgcacctccctatgttaaaatgccaggtagaccaaagaaggagaggagaagggagccacatgaaaaacccaaagcaaccagggtgtcaaaagtgggcactatcattaggtgtagaagatgcaagggaattggacacaacaagacaacttgtgcaagagaaatgcaggcactgctcaggcttcgtctagtgcacaatctaggcctattaacaagaagagctcctcaaaagtga

SEQ ID NO: 234 - protein, 685 aa, Oryza sativa
MESSYTMVGKSITVVDLKQYHAFDRDKVSLPEVKGHLKDHCAVEEPMLLHWLFPMKELKDGLRVLLDDKAAKIFEVDTKGKKPVMIVTSIPDKTQGQIESLRQCHNLAKKDKEEAQVVAHNDQLVPYSAEKDSDGQLITKRSKYPRFRGSSSSTPTFTLGQLFDCKKEFKDAVIKHALANRRYVKFVKDEGDRVRAKCEWKLCPWVCLLKKTSRTNSWQITSFTDGHTCPQRKDNPMVTSTRIAEKYEKMIRDNPTWSIKNMISTVSEEMFANASVPQCKRAKAHVLKKLYDATRCEYSRIFDYQLELLRSNPGSIVVVTLDSDSPTPVFHRIYVCLNACKKRFLAGCRRVVGLDGCFFKGSTNGELLCALGRDANNQMYPIAWAIVEKETNDSWDWFCALLFKDLVAGDGDGWVVISDQQKGIINAVETWIPKAEHRNCARHIYANWRKKFKNREWQKKILEARFLPIISMLEAIRRKVMVRIHEHRTKMEKWIGPICPNILKKLNAYVTEYGFCHAISNGNDKFEVKHHEQRFTVNLQSRTCSCRYWQLAELPCCHAIACIHYKTNSLDEYIASCYSVKAFMSTYEHCLEPVEGIHSWPVSKRPKPAAPPYVKMPGRPKKERRREPHEKPKATRVSKVGTIIRCRRCKGIGHNKTTCAREMQALLRLRLVHNLGLLTRRAPQK

SEQ ID NO: 235 - DNA, 1335 bp, Oryza sativa
atgctcgcggagcgcctgatttcgtgcttcgtgttcgacgccgcggcgcacgcaggtgagacgccgctgctgctggcggccacgttcgggcacacctcaacggcggcctacctcctggaccgcggcgccgacccgtccacgccggaccccaacggcggcgacaccccgctccactgggccgcctacaacggggatcgcgagctggcgaagctgctgctgctcaggggagccgacgtgggcgcggcgaacccccgcggcacggcgctgcatgtcgccgctgcacgggggcacgccgccgtcgtcagcgtcttgctgaaccacggcgctgatcccaacaagattgccaatatcgtcttcacaccgttggtttcttcacttttggggggatcattggaatgcatgaagttgctcattcaggccggtgctaacgttaatggtgctggattcaatggagcaactcctctgctgttagcatgtagtcgtaccgggtccattggattcatcaagtgcttggtggaatctggggcagatccaaacattccagacgaacttgataggttaccaatagaaattgctgcaatccatgccgaacgggaagtcattgaggttctattgccattgacccaccaagtacctactcttctagattggagtgttggtgggatcatcagatatgtaaaatatcctgcttacaaggaatgggcaagaaatgcatcatgtaaaaggaaggatgaactcaaactacaaggcaactcctctttcaacaacgaggactacgatgctgcaatactgctatacagcatgttcaaaaggtgcaaaatactgctttgcgatgaggcactctcagatgctcagatctgcagcaagatgcaaccggactgggcgaaaggctattaccgtcaaggaatggccttctctttgctacaggattatgccagtgcttcttatgtgcttcgcagggccttaaagttggatccacaaaatgccacagtcgccaaagcattgcgctgctatgagaataagatatatatgactgaaaatgtgttggaaaagagaggggatgtcttggaaactgcgtgtccaaggatggaagaatctggtctagcttttgttcatcagaagaaacgagattggagccccgcagctgcagggaggagtgttccagatgcaacatttcaaattgacaaaaagatattgccagtttgggttaagatctggggcgtgcctcgtagaccgttgttgggttgtggctggatgtatttgccacctgtaaacaatgtgccggaatcctctgcacccgaggagcagcagatcactgttctgggtagtgagtga

SEQ ID NO: 236 - protein, 444 aa, Oryza sativa
MLAERLISCFVFDAAAHAGETPLLLAATFGHTSTAAYLLDRGADPSTPDPNGGDTPLHWAAYNGDRELAKLLLLRGADVGAANPRGTALHVAAARGHAAVVSVLLNHGADPNKIANIVFTPLVSSLLGGSLECMKLLIQAGANVNGAGFNGATPLLLACSRTGSIGFIKCLVESGADPNIPDELDRLPIEIAAIHAEREVIEVLLPLTHQVPTLLDWSVGGIIRYVKYPAYKEWARNASCKRKDELKLQGNSSFNNEDYDAAILLYSMFKRCKILLCDEALSDAQICSKMQPDWAKGYYRQGMAFSLLQDYASASYVLRRALKLDPQNATVAKALRCYENKIYMTENVLEKRGDVLETACPRMEESGLAFVHQKKRDWSPAAAGRSVPDATFQIDKKILPVWVKIWGVPRRPLLGCGWMYLPPVNNVPESSAPEEQQITVLGSE

SEQ ID NO: 237 - DNA, 2106 bp, Oryza sativa
atggcaggagggcccttgaagctgtggaatgcgtgggcaacacagatcctagttctattgagcctcacactgcagatcgtcctcctcctcttcgctgggatccgccggcgtgagtcatctgccttgctgaggttcttcctctggttggcgtacctgctggctgactccaccgcgatatacaccctcgggcacctctccctgagcagcgtgacacgtgaccacaagctggtggcattctgggcgccattcttgcttctccaccttggcaggccagacaacatcaccgcctatgcgctgcaggacaaccagctctggttgcgccacctgcagattcttgtcgtccaagttcttggagccgggtatgtcgtctacaagcgtcttattgttggtggagagaagacgattctcctgctggccactgtcttgatgttcatggttggcctcgtcaagtattgtgagaggacttttgcactgaagcgcggcgacttcagcagcatccggagctatgtcaaggagctaccgggtaagcaactccgttggtacagaggttacttgcagagtgaggatcattacaactccaatgatgaattccttctgcagcgcgcccactccctattccacatctgcaagcgtgggatagtagactcggtgatcaatgtggatatggataaaaccgaggctgaaatcacaagaaaattaatcaaccagatcaggaatccacaacagcccatggtcatgtggaaggtgatggagatggagttgtccctgttgtatgatattctctacaccaaagcagccgtgatccacacatggattggctacttaatccgagccatgacaccggttgccatcgtctcgtccttccttctgttccattttagtgatagcaaagatggccagaatgtggttgacatcactgtcacttatatcttgttgggtggtgccctcatgatggagatgacatccctgctgagcgcactagggtcgagttgggctcttgctttcctgtgtgccattccatggagctcacttcggcatgcagttttatgtgctggaagatggcaccggctccgccgagcagtcgtgacccttcgccaggttgtcatggcaatgaccggaggtttcctaggaagatcaaggaagtggtcaggcaccataggtcagttcaacatgctctacttccgtgctgcacagatccatgcaacgaaccgacggttcggcacgctagctaagaagctggggtgtgaggattggtgggacagcacttgttactcacacagtatcaagattcccaatacggtaaaggaacgggcagtgaaaatggtctcgaagcgtgctatcaacaccctgggcttgctcaggcataggtggggcgagctggcactagataaaaagaagtatcctaagctggtaggagatctggaggaatgggagggtgttgacttccacgagagcatcatcatttggcacatcgccaccgatctcatcctctgtgggagaaacaggtccagtaacgactcaacaaaaaagaaagaagttgaacgtgtccgttcaatcagggcaatgtcaaattacctcatgttcctccttgtgactcgccctgacatggttcctggccttccccagaactggttgtaccaacgaacctgcgataacctcgacaaaatatgcaaagagaatcgtgtgcaactcatttcttccggtggcagggcttacaacattgtgttcatggttctcatgaagttgatccggggcaacaataacaatagcacaacatcttatgggcttgagcagaccaacgaacttgccaaaatcctacttgggatgaaggtatcaggcaaattcgatccttcagttcctcgcctcacatatgcacatgggatcgctaagacagtgttaggttggaagggtgaagatcaattgaaggatgcagatccagtgaaggtattgcttgacttatggacggattttctcatctatgcagccaaccggttcagtgtaaaggtacatggaatatacacttccatagatcctctgatcagtgttggttccaaacagctatcagtgccaattttggaaccggcacaacagttgccgcacttatga

SEQ ID NO: 238 - protein, 701 aa, Oryza sativa
MAGGPLKLWNAWATQILVLLSLTLQIVLLLFAGIRRRESSALLRFFLWLAYLLADSTAIYTLGHLSLSSVTRDHKLVAFWAPFLLLHLGRPDNITAYALQDNQLWLRHLQILVVQVLGAGYVVYKRLIVGGEKTILLLATVLMFMVGLVKYCERTFALKRGDFSSIRSYVKELPGKQLRWYRGYLQSEDHYNSNDEFLLQRAHSLFHICKRGIVDSVINVDMDKTEAEITRKLINQIRNPQQPMVMWKVMEMELSLLYDILYTKAAVIHTWIGYLIRAMTPVAIVSSFLLFHFSDSKDGQNVVDITVTYILLGGALMMEMTSLLSALGSSWALAFLCAIPWSSLRHAVLCAGRWHRLRRAVVTLRQVVMAMTGGFLGRSRKWSGTIGQFNMLYFRAAQIHATNRRFGTLAKKLGCEDWWDSTCYSHSIKIPNTVKERAVKMVSKRAINTLGLLRHRWGELALDKKKYPKLVGDLEEWEGVDFHESIIIWHIATDLILCGRNRSSNDSTKKKEVERVRSIRAMSNYLMFLLVTRPDMVPGLPQNWLYQRTCDNLDKICKENRVQLISSGGRAYNIVFMVLMKLIRGNNNNSTTSYGLEQTNELAKILLGMKVSGKFDPSVPRLTYAHGIAKTVLGWKGEDQLKDADPVKVLLDLWTDFLIYAANRFSVKVHGIYTSIDPLISVGSKQLSVPILEPAQQLPHL

SEQ ID NO: 239 - DNA, 875 bp, Oryza sativa
atggctctgcgatcggcggccggtaggctggcgtcgtccagccgccgccgcctcctctctccgcccaccagcatccacacggccttcctccactcccacgccaccagcttcggtgtagctgaagaggacaaaagcaaattggtcggtaacgtcttcagcagcgtcgcctccagttacgatctcatgaacgatcttatgagcgttggactacataggttgtggaaggacagaggctcatctcaaagcttaatccttttcctgggatgaagcatctagatgtggctggtggaacagggggatgttgccttccgtgcgctcgagagaatcaatagcgtgagccatagagctatgcagggtactcttactgatattgaagaagaaacacaaatctatgtttgtgacattaatccaaatatgctgaatgttggaaagaaacgtgcttcagaaagagggagatgctgaagctctgagttttgaggatggatctatggatggctatactattgcgtttgggatcagaaatgtgacacacattgaaaaagctctatcagaagcttatagagagtcctaaagcgagggggaaggttcctatgcttggaattgagtcatgtggatgttccgctttttaaagagattatgatgtttattcattttctgtgattccggctgtgggagaactagtggccggtgatcgccagtcataccaatacttggttgagagtatccgccggtttccaaatcagtatctggtgatcaaacttgtgcttttccaggaaaagtttgctcagatgatccaagaagccggatttgagagggtagaatacgaaaatctggtgggtggtgtggttgccattcactctggactgaaactgtag

SEQ ID NO: 240 - protein, 291 aa, Oryza sativa
  X_region (83)..(83): Xaa = any naturally occuring amino acid
  X_region (111)..(111): Xaa = any naturally occuring amino acid
  X_region (140)..(140): Xaa = any naturally occuring amino acid
  X_region (187)..(187): Xaa = any naturally occuring amino acid
  X_region (212)..(212): Xaa = any naturally occuring amino acid
MALRSAAGRLASSSRRRLLSPPTSIHTAFLHSHATSFGVAEEDKSKLVGNVFSSVASSYDLMNDLMSVGLHRLWKDRGSSQSXNPFPGMKHLDVAGGTGGCCLPCARENQXREHRAMQGTLTDIEEETKSMFVTLIQICXMLERNVLQKEGDAEALSFEDGSMDGYTIAFGIRNVTHIEKALSEAYXRVLKRGGRFLCLELSHVDVPLFKEXYDVYSFSVIPAVGELVAGDRQSYQYLVESIRRFPNQYLVIKLVLFQEKFAQMIQEAGFERVEYENLVGGVVAIHSGLKL

SEQ ID NO: 241 - DNA, 2556 bp, Oryza sativa
atgtacaaagtagcgtgcaagaatgggttgatgaaaccaagaggttatttttcctcaggaccaccaacaatgtcaggaacaacatcactaatggcactactcctctgcgggttggaaatctgcgtcatgatccctcagaagatatcaggagttcaaactatccttccttgtataatcaaagagaaagagggccatctaattcaattgtaaatagacatgtcgatacagattttggctaagcatcgtgtgatgtatcagtcagcacatgctgtgcctgccccattcagtgttgccaattatggatatcaaaccactgaacctgcttgatggctccaaggaggaaattccttggcacgattccgttacggtggaatcttctctgcctaaagtttccaagtcagagacaactttggtggttgataaagctatcccaaacaaaaaggagcacaaacgcattacaaggaaagtgacgctaaatatcccggacaaagcttccttgtccactgagtcaaaaaatgcacggaagttgcttgctaccatctatgacaaagttttggttgtcgacaatgttgagtcagctaggagtgttgttaaattgcttactacaaagtacaaaggctttattcatgcatgtgacacggaggtggcaaatattgatgtcaaagaagagacgccagttggtcatggagaagtaatatgctttagcatctattcaggaaattctgatggggaggctgattttggaaatggcaaaacatgcatatgggtggatgtgctagatggtggaagggatgttctaatggagtttgctcctttctttgaggacccatctatcaaaaaggttcacttcgattcctcattttaataagtttggcataactatagttttgatagccatgtcattgagaactgtggaatcaaggttgctggatttcatgctgatacaatgcatcttgcacgcctgtgggattcttccaggagagctgatggtggatattcacttgaaggactaacaaatgatcacagaatcatgaatgctgttctaaaggacatacataaaactgggaaggtgtcaatgaaaactatttttggtcggaaaaatgttagaaaaaatggatctgaagggaaaaccatatctatcgagccagtcaaaaagttacaaagggaggatagagagttgtggatttgctattcctcactagattcaatgagtacattgaagctttatgaaagcttgaaaaacaagcttgaagcaaaggaatggattttcgatggttgtcctagaggaacaatgtatgatttctacgaagagtattggcgtccctttggtgctcttcttgtaaagatggaaacagagggaatgtttgttgaccgtgcatacctttcggagattgagaaaactgctgttgttgaacgaaaattagcagcggataagtttcggaaatgggcatctaagcattgtcctgatgccaagtacatgaatgtgaatagtgataatcaaattcgccaacttttctttggtggcatcaaaaatagagaaataagcctggtgaaacttggccacaaagtaaagcttttaaagtgccaaatgatgaaagcatagctacagagggcaagaagattccaaagtctcgcacaatcaaacttttcactattgtggaagatcttaaacttttcactacagagggcaagaagactacaaagactggctggcttaaaggagatcatatatcatgtaaggaagggcgcattcactgttcgttaaatatcaatactgaaacaggacgcttgtcagcaagaacaccaagcttgcagttgcagaatcaacctgctcttgaaaaggataggtacaagattcgccaagcttttgtcgcagctccagggaacactcttattgttgctgattatggccaactggaactgaggatcttggcgcatcttactaattgtaaaagcatgctggaagctttcaaggctggtggtgactttcattctaggacagccatgaatatgtaccagcatgttcgtgatgctgttgaagaaaagaaagttctgcttgaatggcatcctcaaccaggtcaagacaaacccccagtgccattattgaaggatgcttttggcgctgagaggaggaaggccaaaatgctcaatttctccattgcatatgggaagactgctgttggtctatctcaggattggaattggcaggttgaagttagggaagcaagggatacactcaaactttggcatagggatagaaaggaaatttcagcttggcaaaagaagcagaaagcccttgcgtttgagaagtgcgaagtctacactttgctcgggcgatcacgccaatttcctaatatgactcatgcgggtcctggtcaaaagagtcacgtcgagcgtgctgctataaatgcaccagtgcagggcagtgcagcagatgttgctatgtgtgcaatgcttgagatagaaagaaacgctcgccttaaggagcttggttggagactcctattgcaggtttatgacaataacactcctacgtttacaaaaggaagtacttag

SEQ ID NO: 242 - protein, 336 aa, Oryza sativa
  X_region (272)..(272): Xaa = any naturally occuring amino acid
GRAHSLFVNINTETGRLSARTPSLQLQNQPALEKDRYKIRQAFVAAPGNTLIVADYGQLELRILAHLTNCKSMLEAFKAGGDFHSRTAMNMYQHVRDAVEEKKVLLEWHPQPGQDKPPVPLLKDAFGAERRKAKMLNFSIAYGKTAVGLSQDWNWQVEVREARDTLKLWHRDRKEISAWQKKQKALAFEKCEVYTLLGRSRQFPNMTHAGPGQKSHVERAAINAPVQGSAADVAMCAMLEIERNARLKELGWRLLLQVYDNNTPTFTKGSTXLRTHLSKRFTSIPHFNKFGITIVLIAMSLRTVESRLLDFMLIQCILHACGILPGELMVDIHLKD

SEQ ID NO: 243 - DNA, 1032 bp, Oryza sativa
  misc_feature (1017)..(1017): y = cytosine or thymine
atggctttcttgctcttctttgtctttgtgacagctgcagtgctgtgcttcgtcgtcccggcgttcttgctgctctgcacgagcgtgcagaggaggagagatgttggacagggtggagggcgagattggcagaagaagaagaagctcaggcttcctccgggatccatgggctggccgtacgtcggcgagacgctccagctctactcccaggaccccaacgtcttcttcgcctccaagcagaagagaggtacggcgagatattcaagacgaatctgctggggtgcccgtgcgtgatgctggcgagcccggaggcggcgaggttcgtgctggtgtcgcaggcgaggctgttcaagccgacgtacccgccgagcaaggagcggatgatcgggccgtcggcgctcttcttccaccagggcgagtaccacctccgcctccgccgcctcgtccaggccgccctcgccccggactccctccgcgccctcgtcccggacttcgacgtcggcgtcgtgaccatcttcggcggccggctcggccgccggcacagggaggagctgaggacgaactactccgtcgtggagagaggctacaactgcttccccaaccgcttcccggggacgctctaccacaaggcgatccaggcggagcagatggcgatctacgtggccaacgagggcgggaagcggccgctgacgtggacgcagacgaggagcatgacactcacgcatcaggttatactggagagcttgaggatggcgagcataatctccttcacgttcagagaggcagtcgccgacgtggagtacaaagggtttcctgattccaaaggggtggaaggtgatgcctctgttcaggaacatccatcacaacccggactacttccaggatccacaaaagtttgatccttctagattcaagccgcgtccaagcacgttcctgccgttcgggagcggcgtgcacgcgtgcccgggcaacgagctggccaagctggagatgctcgtcctcgtccaccgcctcgtyaccgcctacaggtaa

SEQ ID NO: 244 - protein, 343 aa, Oryza sativa
MAFLLFFVFVTAAVLCFVVPAFLLLCTSVQRRRDVGQGGGRDWQKKKKLRLPPGSMGWPYVGETLQLYSQDPNVFFASKQKRYGEIFKTNLLGCPCVMLASPEAARFVLVSQARLFKPTYPPSKERMIGPSALFFHQGEYHLRLRRLVQAALAPDSLRALVPDFDVGVVTIFGGRLGRRHREELRTNYSVVERGYNCFPNRFPGTLYHKAIQAEQMAIYVANEGGKRPLTWTQTRSMTLTHQVILESLRMASIISFTFREAVADVEYKGGFLIPKGWKVMPLFRNIHHNPDYFQDPQKFDPSRFKPRPSTFLPFGSGVHACPGNELAKLEMLVLVHRLVTAYR

SEQ ID NO: 245 - DNA, 3560 bp, Oryza sativa
  misc_feature (1041)..(1041): y = cytosine or thymine
  misc_feature (1069)..(1069): y = cytosine or thymine
  misc_feature (1126)..(1126): s = guanine or cytosine
  misc_feature (1129)..(1129): y = cytosine or thymine
  misc_feature (1133)..(1133): s = guanine or cytosine
  misc_feature (2592)..(2592): s = guanine or cytosine
  misc_feature (2795)..(2795): s = guanine or cytosine
  misc_feature (2816)..(2816): s = guanine or cytosine
  misc_feature (2843)..(2843): s = guanine or cytosine
  misc_feature (2845)..(2845): s = guanine or cytosine
  misc_feature (2900)..(2900): y = cytosine or thymine
atgttgttaaggtccttgaagatggagacttgcaaactcttggattgttggattacgacaaacggttgaaacactctttcactgctcatccaaaggtcgatccatttacagacgaaatgttcgcttttggatattcgcatgaacctccttactgtacataccgggtcattaccaaggatggagccatgcttgatcctgtgccaataacaattccagaatctgtaatgatgcacgactttgccattacagagaattattctattttcatggaccttcctctgttgttccgaccaaaggaaatggtgaagaatggtgagtttatctacaagtttgatcctacaaagaaagctcgttttggtatactccaacgttatgaaaaggatgacacaaacatcagatggtttgaacttcccaactgcttcatattccacaatgctaatgcttgggaagagggtgacgaagttatcctaattacctgccgcttggagaatcctgacttggacaaggtgaacggttaccaaagcgacaatctcgagaactttgggaatgagctgtatgagatgagattcaacatgaaaaccggtgctgcttcacaaaagcaactatctgtttctgctgtagattttcctcgaattaatgagagctacactggcagaaagcagcggtatgtgtattgcgctattctaaacagcatagcgaaggtagcaggcattataaaatttgatctacatgctgaaccggagatcagtggcaagaaacaacttgaagtggggggaaatgtgagaggaatatttgacttgggacctggtagattcgggtccgaggcaatttttgtgcctagggaacccggtgtatctggagaagaagatgatggttatttgatattctttgtccacgacgagaatacagggaaatctgaagtcaatgtgattgatgcaaagacaatgtctgctgatccggtggcagttgttgagctaccaagccgagttccctacggattccatgctttctttataaacgagctgctttccggccaccttytccgccgccgtcttacaacgccggcgtygaacccttcctccgacgacaaccagtcccgcttcttcttctccgtcctccacgccgsctyccgsacccccgtctggacagccaccgccggcaccaccatcctccagtccatcgtcctctccctcaccgcccagggcctcgccctctccgaccccgaccccgccgccgactacgcctggtccacgccccgcctccgcgcccccgtcgccgctctccgcctcctcgacaccggcgagctcgccctcctcgacgccgccaacgccacgctctggtcctccttcgaccaccccaccgacaccctcctccccgcccagcccctgctcgccggcgtgttgctcacgtcgcccgtctccgaccaggacctcaacccgggcgcctaccgactcatgctcaccgacaccgacgcgctgctgcagtgggcgactaataatggctcctccttcctcacctactgggcgctctccaccgaccccaactccgtccaggactccaacgccgccgtccactccatgacggccaactcctctggcctctacctcctcgctgccaacggcagggacaccgtcttccgcctgcgcttcccctcgcctgacgctaatggtgacccctgcctcctcaagctcgactcttccggccgcctgcgcgcgctccggctgagcaccacatcgccacgcgcgaccctccccaccgtctgggcggcaccgaccggcggctgcgacctcccgctgccgtgtcggtcgctcggcctctgcacgcccggcaccaacggctcctcctgctcctgcccggacgctttcagcacctactccaccggcggctgcgcgccggcggatggctcagcgcttccacttctagctgacacctgtgcgccgccgcctaatttcaactacatgaccctcggcgaggggatcggctacttcgccaacaagttcgcgtcgccggacacctccggcgaggagctcccggcgtgccgcaacctctgctcggccaactgctcctgcctcggcttcttctacaggaactcctccaagtcttgcttcctgctgaactaccggatcggctccctcttccgcggcgacagcgacgccgccgtcggcttcatcaagacgttgccgccggcgtcgcgtcgccagggcggcggcaagggctcgtcgctcagctttataaccatagtgttcggcatcgcgctgccaaccgtggcggccgtgctcatcggcttcgtcgtgtacgtgatgtgggtgaagagccggcaggccagcaacaagaagaagaagaagaagcagggcggcagccgcagctggttcaagctgccgatgctgtcgtcgcagcaggcgtcgtatgcgagtgaggagcagcagggcgaagaagacgacggcgacggcgacgaggttctcatccccgggttgccggcgaggttcacgtacgcggagctggaggaggcgacggaggggttcaagtcgcagatcgggtcgggagggttcgggtgcgtgtacaggggcgagctcacagacccagagcggagcscggtggtggcggtgaagcggatgaacaaccttgggtcgcaggggcgacgcgagttcctgacggagatggcggtgatcgggaacgcgcaccacgtgaacctcgtcaagctgcgcgggttctgcgccgagggcgcgcggcagctgctggtgtacgagtacatgaaccgcgggtcgctggaccagtgcctgttccgcgccgccgcsgccccgctggagtggccggascggatgggcgtgtgcgtgggcgcggcscscgggctggcgtacctgcacgccggctgcacccgcaagatcctccactgcgacgtyaagccggagaacatcctgctgaacgaccgcggcggagtcaagatcgccgacttcgggctggcgaagctgatgagcccggagcagtcggggctcttcaccaccatgcgcggcacccgcgggtacctggcgccggagtggctcaccaacgcgcccatcaccgacaaggccgacgtgtacagcttcggcatggtgctgctggagatcgtgcgcggcaggaagaactgcaggtcgggcaagggcagcggcggcgaggcttcgtcggactcggacggctacttcccggcgatggcgctagagctgcacgagcaagggcagtacgaggcggtggtggaccagcggctggaagggagggcggacgtggcgcaggtggagcgggtggtgcgcgtggcgctctgctgccttcacgaggacgcggcgctgcggccggccatgacgacggtgtccgccatgctcgacggcagcatggaggccggagttcccaggacggagctgctcgactacctgcgcttgtacggccgcggcctggtcgacgtccgctccggcctccatgctgcggggaaaggcggctccgacttcaccagcggcggcgccggcagcagcagctggtcgcccacgtcgtgcgtgtcggcgcagcagctgtcgggcccccagatgacatga

SEQ ID NO: 246 - protein, 1185 aa, Oryza sativa
VVKVLEDGDLQTLGLLDYDKRLKHSFTAHPKVDPFTDEMFAFGYSHEPPYCTYRVITKDGAMLDPVPITIPESVMMHDFAITENYSIFMDLPLLFRPKEMVKNGEFIYKFDPTKKARFGILQRYEKDDTNIRWFELPNCFIFHNANAWEEGDEVILITCRLENPDLDKVNGYQSDNLENFGNELYEMRFNMKTGAASQKQLSVSAVDFPRINESYTGRKQRYVYCAILNSIAKVAGIIKFDLHAEPEISGKKQLEVGGNVRGIFDLGPGRFGSEAIFVPREPGVSGEEDDGYLIFFVHDENTGKSEVNVIDAKTMSADPVAVVELPSRVPYGFHAFFINELLSGHLVRRRLTTPAWNPSSDDNQSRFFFSVLHAGCRTPVWTATAGTTILQSIVLSLTAQGLALSDPDPAADYAWSTPRLRAPVAALRLLDTGELALLDAANATLWSSFDHPTDTLLPAQPLLAGVLLTSPVSDQDLNPGAYRLMLTDTDALLQWATNNGSSFLTYWALSTDPNSVQDSNAAVHSMTANSSGLYLLAANGRDTVFRLRFPSPDANGDPCLLKLDSSGRLRALRLSTTSPRATLPTVWAAPTGGCDLPLPCRSLGLCTPGTNGSSCSCPDAFSTYSTGGCAPADGSALPLLADTCAPPPNFNYMTLGEGIGYFANKFASPDTSGEELPACRNLCSANCSCLGFFYRNSSKSCFLLNYRIGSLFRGDSDAAVGFIKTLPPASRRQGGGKGSSLSFITIVFGIALPTVAAVLIGFVVYVMWVKSRQASNKKKKKKQGGSRSWFKLPMLSSQQASYASEEQQGEEDDGDGDEVLIPGLPARFTYAELEEATEGFKSQIGSGGFGCVYRGELTDPERSAVVAVKRMNNLGSQGRREFLTEMAVIGNAHHVNLVKLRGFCAEGARQLLVYEYMNRGSLDQCLFRAAAAPLEWPERMGVCVGAARGLAYLHAGCTRKILHCDVKPENILLNDRGGVKIADFGLAKLMSPEQSGLFTTMRGTRGYLAPEWLTNAPITDKADVYSFGMVLLEIVRGRKNCRSGKGSGGEASSDSDGYFPAMALELHEQGQYEAVVDQRLEGRADVAQVERVVRVALCCLHEDAALRPAMTTVSAMLDGSMEAGVPRTELLDYLRLYGRGLVDVRSGLHAAGKGGSDFTSGGAGSSSWSPTSCVSAQQLSGPQMT

SEQ ID NO: 247 - DNA, 744 bp, Oryza sativa
atggcgcaagatgatgaggacgtgggtctagctctgggcctctccctgggctccggcggccacaggcggcagagagaaagtagagacgaagcgccgtcgtcggcggcggcgtccctgctgacgctgaggctcccggcagagagcggggggcagccgcaggtggtggtgaagagggaggtggtgcgggcggaagaggaggagtacgaatacgagtacgagagggcgctctactcgtcgtcggctgcggcggcggacgacgacgagggctgcaacagccggaagaagctgaggctgagcaaggagcagtcggctctgctggaggatcgcttcaaggagcatagcactctcaaccctaagccaaaggttgctttggcgaagcagctaaacctgaggccaaggcaagttgaggtgtggttccaaaacagaagagccaggacgaagctgaagcagacggaggtggattgcgagcttctgaagcgctgctgcgagacgctgacggaggagaaccgacgcctccatcgtgagctccagcagctcagggctctgacccactccaccgccgccggcttcttcatggccaccaccctccccgtccccgccgccacgctctccatctgcccctcctgcgagcgcctcgccaccgccgccgccgccggagcttcccccaccgccgccgccgaccgcaccaacaagcccaccgccccgcacttgttcagccctttcgccaagtccgccgcctgctag

SEQ ID NO: 248 - protein, 247 aa, Oryza sativa
MAQDDEDVGLALGLSLGSGGHRRQRESRDEAPSSAAASLLTLRLPAESGGQPQVVVKREVVRAEEEEYEYEYERALYSSSAAAADDDEGCNSRKKLRLSKEQSALLEDRFKEHSTLNPKPKVALAKQLNLRPRQVEVWFQNRRARTKLKQTEVDCELLKRCCETLTEENRRLHRELQQLRALTHSTAAGFFMATTLPVPAATLSICPSCERLATAAAAGASPTAAADRTNKPTAPHLFSPFAKSAAC

SEQ ID NO: 249 - DNA, 1950 bp, Oryza sativa
  misc_feature (636)..(636): n = any nucleotide
atggcttcccacgacgctattgctcctgagaagacgaccaactatgagccctcagtctggggggatttctttatcaactatagaccacaaccgctccagaaaagatatcacgtgaaatgtcaaaaatgcccttgggcccacatgccagctcctccatctctattccaccacgagcgccgttgttcgcagagtggagcgccgacagcgctgggagtcgtgcggcaacggcagatggcggagtgtagcactgggagcgctgggagtcgtgcagcaacggctgtcccggttgcggcagcgacgccgacgataaccacgacgacgcgcggcgatggcggctgcggcaattgcagcgcggcggtgactacgccttcgccgcttggggccccggtggcggagggtggggacgacaaccagaaggcggtggcggagggtgaggacgacaacgaggaggccatggcagacggccccaagatcaagatcctggcgcgcggtggcggcagtggtggcggcggcggtggcagtggtggcggtggcggtcatggtcgccgttggccatggcggctgcgtcggcatggtgacggcgaatgcagtggcgacgacgatgacgacggcacgaagacggaccgacgtggtgtncacttgcaaattactacatttatggagtggtttcccccaaaaagatcagaggaatggatgaggcagagagccaagaggctcaagatgaatgtccgcacactattctggacttccaatgatgtggttgtaaggatgaacttagtggatgcagtccaacgtctaggaattggtcacctcttcaaagatgagataaggcgcacactaaatgatatacaccaaagtgaatttactagctctagcctccatgaggttgctcttcggtttcgcttgcttagggagcacggcttatgggtatctccagttacattcaacaaattcaaaggtgacgatgggaggttcatgaatggaatagctgatgaaccaaggggtttattaagtttatacaatgcagcttacctccttgttcatgatgagccagaactcgaagaggcaatctctttttctaggtaccatctaaaatcaatgatgcagggcaataacctcaaacaccctttatctgaccaagtcaagcgtgcccttaacacaccattaccaaggacatccaaaagaacagagacattgcattatctttcggagtatggacaagaggaagggcatatgtcaattcttttggatcttgcaaaggtggaatttaaccttctgcagggggtccacttgaaggagctcaaagctatttctgagtggtggagagaccttaatgaacatgtggagctaagttatcttagggatcgtgtggtggagagctatacatgttcacacatgttgttctatgaagaaggcttagcattcacacggataacttttaccaagataattgtactaattattatgatggatgatacatatgattcccatgctaccatccaggaatgcaggaagctaaatgaagccatacaaagatggaatgagagtgccgtctctgtcctaccagagtacctaaaaaatttttaccataaattgttgaataattttaaggagtttgagaatcaagtggtggttagtgagaagtaccgggttgctcatgctaaaaaagaggaagctgaatggtcacataataattacaagccaagttttgaagagcagttggctttatctacaaagacttcaacggtgcaactattatgtgtgtctactacggtcggccggggtgatgcaataacaaatgaagcattcatgtgggcagctagcagtactaccgtgacatcatgtgcaaagataatgcgtttcatgaatgacattgcttcatttgagaacaacattgttcctgagtggccacagtatttgttcaagctcatcattatagagaaacggtaa

SEQ ID NO: 250 - protein, 649 aa, Oryza sativa
MASHDAIAPEKTTNYEPSVWGDFFINYRPQPLQKRYHVKCQKCPWAHMPAPPSLFHHERRCSQSGAPTALGVVRQRQMAECSTGSAGSRAATAVPVAAATPTITTTTRGDGGCGNCSAAVTTPSPLGAPVAEGGDDNQKAVAEGEDDNEEAMADGPKIKILARGGGSGGGGGGSGGGGGHGRRWPWRLRRHGDGECSGDDDDDGTKTDRRGVHLQITTFMEWFPPKRSEEWMRQRAKRLKMNVRTLFWTSNDVVVRMNLVDAVQRLGIGHLFKDEIRRTLNDIHQSEFTSSSLHEVALRFRLLREHGLWVSPVTFNKFKGDDGRFMNGIADEPRGLLSLYNAAYLLVHDEPELEEAISFSRYHLKSMMQGNNLKHPLSDQVKRALNTPLPRTSKRTETLHYLSEYGQEEGHMSILLDLAKVEFNLLQGVHLKELKAISEWWRDLNEHVELSYLRDRVVESYTCSHMLFYEEGLAFTRITFTKIIVLIIMMDDTYDSHATIQECRKLNEAIQRWNESAVSVLPEYLKNFYHKLLNNFKEFENQVVVSEKYRVAHAKKEEAEWSHNNYKPSFEEQLALSTKTSTVQLLCVSTTVGRGDAITNEAFMWAASSTTVTSCAKIMRFMNDIASFENNIVPEWPQYLFKLIIIEKR

SEQ ID NO: 251 - DNA, 1092 bp, Oryza sativa
atggaggcggcgacgatggcgtggacggcggcgggggtggggatggcgctggtgtactggttcgtgtgggtgatgggagcggcggaggtgaaggggaagcgggcggtggatctcaagatgggatccatcacgaacgacaaggtgaaggacaagtacacgcagtactggtcgttcttccgccgccccaaggagacggcgaccaccgaggcctccgccgagaaggtgccggccttcgtcgacaccttctacaacctcgtcaccgacatctacgagtggggttggggtcagtcgttccacttctccccttccctccccggccgttcccaccgcgaggccacgcgcgtccacgaggagcgcgtcgccgacctcctccaggccaagccgggacaccgcctcctcgacgtcggctgcggcgtcggcgggcccatgcgcgccatcgccgcacactccggctccaacgtcgtcggcatcaccatcaacgagtaccaggtgaaccgcgcccgcgcgcacaaccgcaaggccggcctcgactcccgctgcgaggtcgtctgcggtaacttcctctccatgccgttctccgacgcctccttcgacggcgcctactccatcgaggccacctgccacgcgcccaggctgcaggacgtctacggcgaggtcttccgcgtgctcaagccgggcggcctctacgtctcctacgagtgggtcaccacctccctctaccgcgccgacaacccggagcacgtcgaggccatccacggcatcgagcgcggcgacgcgctcccgggtctccgccgccaggacgagatcgcgtccatcgccaaggaggtcggattcgaggtgctcaaggagctcgacctcgccctcccgcccgctctcccatggtggactcgcctcaagatggggcgcatcgcatactggcgcaactccctcgtcgtccgcgtgctcaccatgctccggattgcacccaagggcgtctgcgaggtgcacgagatgctctacgagaccgcgcagcacctcacccgcggcggcgagaccggcatcttcacgccgatgcacatggtgctcctccgcaagcccgtcgagagcaaatag

SEQ ID NO: 252 - protein, 363 aa, Oryza sativa
MEAATMAWTAAGVGMALVYWFVWVMGAAEVKGKRAVDLKMGSITNDKVKDKYTQYWSFFRRPKETATTEASAEKVPAFVDTFYNLVTDIYEWGWGQSFHFSPSLPGRSHREATRVHEERVADLLQAKPGHRLLDVGCGVGGPMRAIAAHSGSNVVGITINEYQVNRARAHNRKAGLDSRCEVVCGNFLSMPFSDASFDGAYSIEATCHAPRLQDVYGEVFRVLKPGGLYVSYEWVTTSLYRADNPEHVEAIHGIERGDALPGLRRQDEIASIAKEVGFEVLKELDLALPPALPWWTRLKMGRIAYWRNSLVVRVLTMLRIAPKGVCEVHEMLYETAQHLTRGGETGIFTPMHMVLLRKPVESK

SEQ ID NO: 253 - DNA, 363 bp, Oryza sativa
atggcgtcgaccaggcaggctctcatcgcgttcgccgtcgtcctcctcgccgccgctttcctcgtcgccgcctccgccgccgacgaaacccaggctaacaagaaggaggacaccaaggtggacgtgcaggactactggcgcggcggcggcgggtacccaccacggggcggcggctatggctatccggggcgcggctacggctatccggggcgcggcggcggcggtggctacccgggcggaggaggaggctggcacggctgccgctgctgcggctacggctaccgcggcggatgccgctgctgcgcgagccccgacgagatcccggagcccatgtaccgcccggaggtggatccccacaactga

SEQ ID NO: 254 - protein, 120 aa, Oryza sativa
MASTRQALIAFAVVLLAAAFLVAASAADETQANKKEDTKVDVQDYWRGGGGYPPRGGGYGYPGRGYGYPGRGGGGGYPGGGGGWHGCRCCGYGYRGGCRCCASPDEIPEPMYRPEVDPHN

SEQ ID NO: 255 - DNA, 498 bp, Oryza sativa
atgtcaaacccctctaatatctttagtcccggcgcggagagatcaaggcgtgcgggatcgagatacatatctcctcctcccctcctccctcccggttctatctcttcttctcctccccttctcctcgctatcttacacgcggaggatcctctcctcctccccctcctctccttctcctccccctcccccctcctccccgatctgcaggcggcggcgccacgcgaggctcctcctccccctccccccactcatccccgatctgcaggcgcggcaccggcctcgcgcggcggccggcgcgcggcgctggctggcggaaggcggaaggtggcggctgggcggcaggcggaagatggcggcttattttgtgatgtatttggagatgatcgatttgaggatttggagccagggatcggcctggctctatctacaccaaccgggactaaagatagatttttactcccggttatttcacccgggactaaatatagcgatctttag

SEQ ID NO: 256 - protein, 165 aa, Oryza sativa
MSNPSNIFSPGAERSRRAGSRYISPPPLLPPGSISSSPPLLLAILHAEDPLLLPLLSFSSPSPLLPDLQAAAPREAPPPPPPTHPRSAGAAPASRGGRRAALAGGRRKVAAGRQAEDGGLFCDVFGDDRFEDLEPGIGLALSTPTGTKDRFLLPVISPGTKYSDL

SEQ ID NO: 257 - DNA, 1650 bp, Oryza sativa
atgggcgcccgcgcctctcgccaccgccaatcccccgaccaatcccaatcccaatccccatccccacaccacaagcaccaccaccaccaccaaaccacccgggcccccaagcccaagcccaagccccagccaccgccgccgcagcagccgcgatctcagcctccgccgccgccgcggcaccagccccagcaggcgccccagcaggcggcggcggaggatggggtggggcgggtgctggggcggcccatggaggacgtccgtgcgacctacaccttcgggcgggagctggggccggggcagttcggggtgacctacctcgccacccacaagcccaccggccgacgctacgcctgcaagtccatcgccgcccgcaagctcgcccgccccgacgacctcgacgacgtccgccgcgaggtccacatcatgcaccacctcaccggccaccgcaacatcgtcgagctgcgcggcgcctacgaggaccgccactccgtcaacctcgtcatggagctctgcgagggcggcgagctcttcgaccgcatcatcgccaggggccactactccgagcgcgccgccgccgccctctgcagggagatcgtctccgtcgtccacagctgccactccatgggggtcatgcacagggacctcaagcccgagaacttcctcttcctcaacaagcgcgaggactccccgctcaaagccaccgattttggcctctccgtcttcttcaagcccggtgagcagttcagagatcttgttggaagtgcatattatgtggctcctgaggtcctaaaacgactatatggagctgaggcagacatatggagtgctggagttatcctttacatccttctatcaggggttcctccattctgggcagaaaacgaggacggtatatttgatgctgttctgcaaggtcatatcgacttctcatctgaaccatggccttctatatctagtggtgcaaaagacttggtcaagcggatgcttcggcaggacccaaaggagcggttaactgctgctgaaattttgaaccacccatggattagagaggatggagaggccccagataaaccacttgatattacagtgatcagtagaatgaagcagttcagagcaatgaacaaacttaagaaggttgccttgaaggtcgttgcagagaacttgtcagaggaagagattgtgggtttaaaggaaatgttcaaatctttagatactgataacagtgggacgataactcttgaagaactaagagctggtctaccaaagcttggcactaaaatttcggaatcagaattaaggcagttgatggaagcggctgatgttgatggaaatgggtccattgattatgttgaatttatatcagcaacgatgcacatgaatagattagagaaggaagatcacatatataaagcatttgaatattttgacaaggaccacagcgggttcataacagtcgatgaattggaagaagctctgacaaagtacgacatgggtgatgaagcgacaattaaagaaataattgctgaagtggatacagaccatgataatcgaattgattacattgaatatcttgaaaacattggaggagatttggttttcaagtatgctgaatgttgctcagccatctctaagatcatggatgctggctaa

SEQ ID NO: 258 - protein, 549 aa, Oryza sativa
MGARASRHRQSPDQSQSQSPSPHHKHHHHHQTTRAPKPKPKPQPPPPQQPRSQPPPPPRHQPQQAPQQAAAEDGVGRVLGRPMEDVRATYTFGRELGPGQFGVTYLATHKPTGRRYACKSIAARKLARPDDLDDVRREVHIMHHLTGHRNIVELRGAYEDRHSVNLVMELCEGGELFDRIIARGHYSERAAAALCREIVSVVHSCHSMGVMHRDLKPENFLFLNKREDSPLKATDFGLSVFFKPGEQFRDLVGSAYYVAPEVLKRLYGAEADIWSAGVILYILLSGVPPFWAENEDGIFDAVLQGHIDFSSEPWPSISSGAKDLVKRMLRQDPKERLTAAEILNHPWIREDGEAPDKPLDITVISRMKQFRAMNKLKKVALKVVAENLSEEEIVGLKEMFKSLDTDNSGTITLEELRAGLPKLGTKISESELRQLMEAADVDGNGSIDYVEFISATMHMNRLEKEDHIYKAFEYFDKDHSGFITVDELEEALTKYDMGDEATIKEIIAEVDTDHDNRIDYIEYLENIGGDLVFKYAECCSAISKIMDAG

SEQ ID NO: 259 - DNA, 2106 bp, Oryza sativa
atgtctaaccttggagatgggcaactgatatggcagttggttccggcatggagcatgtgctgtcgcaaccccccgtctccggctgatctcgacggcgcacgtcagtcagcgtatcttagtgcagcgagcgacatttttggttggctgaaagctcaccggcacgttgaagccgtcgatgacgccggggttgcgacttgcgagcgtgtacctggccaacgtcgtgccatcgccggtgatgcagtggccgcggtcagcgccgttaaagctgcagcccatgctccgccgccgttttggatccgggagaatctagccgctaggattcctatggtgaccttggctgtgttcgagggagaagggattgggaagatacgcaaaacgagtgcgtgcggaaaacgagtcagtctcccctttctcctgtcaacgtacgcagcccttgtgaggagaagaagagtaggtggtggcggtgatgccttgtgccgcgcgcaggggaggagacagggggattgcgcgccgacgccgcccccccaccatgctgctgcaccgccgtggtctcctcctccgcggcggcggcggcctcctccgccgcctatcagtggcggtcgaggaatccgtctccccgtcgccgcctcctccgccgccgcggcaaccgcaggaggactccgagggctccgtggccgccgaggagagagcctctccctcgcctcctccgccgcggcgcaagaaggactccctcttccgccgggtcgcggccgccgcggacccgcgcctcccgctttcccccgtcctggagcagtggtgcctcgccgaggaacgccctatcgcgaagcccgagatccagtccatcatcaagtatctctgccgccgccgccgcttctctcaggcgctccagctttccatgtggatgaccgagcggctgcacctccatctatcccccggcgacgtcgcgtatcggctggagctgatcaccaagggccgttggagtacttcgacagcatgccggatcagctgaagcagcagcagtgctatggctcgctgctcaaatgctacgccgaggccaagtgcgtggagaaggcagaggagctcttcgagaagatgccgggcatggggatggccagttcttatgcttacaatgtgatgatgaggctttatttgcaggatgggcaggttgagagggtgcactccatgcatcgtactatggaagagagtggtattgttgctgatgtgttcactactgatactctagtggcagcgtatgtggttgctgaagatattgaggcgattgaaaaggttctcgagaaggccgatacgtgcaatgatcttatgacctggcactcatacgccactataggcaaggttctcatgcaatctgggatggaagagagggccttgcaggcttttcaagaatcagagaagaagattgctaagaagagtaatagggtcgcatatgggtttttgctcaccatgtatgccgatctagggatgaatagtgaggtggaccgaatctgggatgtctataaatccaaagtgccagcatcggcttgcaactcaatgtacatgtgcaggataagtgtcctacttaagatgaatgacattgttggggctgagaaagcatatgaagagtgggaaagtaagcatgtttaccatgattcccggttaatcaacttactgctcactgcttactgcaaagaaggtcttatggagaaggcagaagctcttgtagatcaattcgtcaagaaagggaggacgccttttggcaatacttggtataagttggctggtggatatttcaaggttggtcaggcgtcgaaggcagcagatctcacaaagaaagcacttgcttctggtagtaatgaatggacacctgacctgacgaatgtgctgatgagcctgaactatttcgcggagcaaaagaatgtcgaagcagctgaggagatggcaagcttattacagagattgattactccaacaagggacatttaccatgggttactgaagacatatgtcaatgcaggaaaaccagtgtcagacttgcttgatcgtatgaaaaaagatggcatggaggctgatgaggaaacagagaaaatccttgccggagaagtccactag

SEQ ID NO: 260 - protein, 701 aa, Oryza sativa
MSNLGDGQLIWQLVPAWSMCCRNPPSPADLDGARQSAYLSAASDIFGWLKAHRHVEAVDDAGVATCERVPGQRRAIAGDAVAAVSAVKAAAHAPPPFWIRENLAARIPMVTLAVFEGEGIGKIRKTSACGKRVSLPFLLSTYAALVRRRRVGGGGDALCRAQGRRQGDCAPTPPPHHAAAPPWSPPPRRRRPPPPPISGGRGIRLPVAASSAAAATAGGLRGLRGRRGESLSLASSAAAQEGLPLPPGRGRRGPAPPAFPRPGAVVPRRGTPYREARDPVHHQVSLPPPPLLSGAPAFHVDDRAAAPPSIPRRRRVSAGADHQGPLEYFDSMPDQLKQQQCYGSLLKCYAEAKCVEKAEELFEKMPGMGMASSYAYNVMMRLYLQDGQVERVHSMHRTMEESGIVADVFTTDTLVAAYVVAEDIEAIEKVLEKADTCNDLMTWHSYATIGKVLMQSGMEERALQAFQESEKKIAKKSNRVAYGFLLTMYADLGMNSEVDRIWDVYKSKVPASACNSMYMCRISVLLKMNDIVGAEKAYEEWESKHVYHDSRLINLLLTAYCKEGLMEKAEALVDQFVKKGRTPFGNTWYKLAGGYFKVGQASKAADLTKKALASGSNEWTPDLTNVLMSLNYFAEQKNVEAAEEMASLLQRLITPTRDIYHGLLKTYVNAGKPVSDLLDRMKKDGMEADEETEKILAGEVH

SEQ ID NO: 261 - DNA, 2571 bp, Oryza sativa
atggcggaggcggtggatgggggcagctgggaggacatgctgaggaggatcctcccgccggggtccccaatcccggaggcgccgccgaatctcgattactccatagccctagagtacgacggcccaccggtggcctatgacctacctagggtggaccccgtcgagatccccacggcggagccggtgtccggcccgcagaggcttgggaacggaggagggttgccggttgtggagcccatcccgctcccagtgtcccggattgcccggtgcgccgagcccgtgtcggcgcaggtcggcggcggcagctcggattcggtcaattcggtactgcagaatgaggagtttgacgatgatgatgatgattcccgctcgttgtcgcatgattcagcgcagagctcgccggggccgcaggataggagccgccggacgcaggaggggaggagaggcgccacggtgacgttcgggttcacgccggacagcaagtgtgagagcaaggagttcgaggagatgtccgagcagtacgtggtggtgaccaagaaggagaagaggaggagggcgtgctatcggtgtgggaagaggaaatgggagagcaaggaagcgtgcatcgtgtgcgatgcgaggtactgcggctactgtgtgctgaggatgatggggtcgatgccggaagggcgcaagtgcgtcacttgcattggccagccaattgatgagtccaagcggtcaaagctagggaagaactcaaggacactctcaaggttacttagccccttggaagtaaggcaaatattgaaagccgagaaggagtgccaagcaaaccagcttcggccggagcaacttattgtgaatggttgtccactggggccagatgagctgacagacctgcttagttgctcccggccacctcagaagctgaagcctggaaagtattggtatgacaaggagtcaggtttatggggaaaggaaggagaaaaaccggaaagaattattagttctaacctcagctttactgggaagcttcaggctaacgccagtaacggaaatacccaagtttatataaatggaagggaaataacaaagattgagctgaaaattctaaaggttgcaaatgttcaatgtcctcgtgatactcatttttgggtttatgatgatggtcgctatgaggaagaaggacagaacaacatcaaaggaaaaatctgggagtcggctttgacacgttttgcatgcgcattattttcacttccggtgcctcctgggaactctaatgaaacgagagatgaagttcactattctgcaagaactgttcctgattatttggaccagaaaagaatccaaaagctgctgcttcttggaccagatggtgctggtacaagcacaatttttaaacaggctaagtacttgtacgggacaagattcacccaagaagaacttgaaaacatcaaactgattatccaaagcaatatgttcaagtaccttggaattttgcttgagggtcgtgaacgctttgaggaagaagctttatctagatcaaattgcacaatttcagaggatgaagaaacccaacaagatgaaaataaagcaaatggttcaaattcctgtatatactcgataaatccaaggctgaagaaattctcagattggcttttggatatcatagcgatgggcgatctagatgctttcttccctgccgcaacgcgagaatacgctccatttgttgatgagatgtggaaggatcctgccatacaagcaacatataaaagaaaggacgaattgcatttccttcctgatgttgctgagtacttcttgagcagggccattgaggtatcgagcaatgagtatgaaccttcagagaaagatgtgatctttgctgaaggtgtaacacaagggaatgggttggctttcattgaattcgcccttgatgatcgcagtcccatgtctgagccttacattgagaaccctgaagcacattcccagcctcttaccaaatatcagttgattagagtaagtgccaagggcatgaatgatggctgcaagtgggtggaaatgtttgaggatgtccgcatggtgatattctctgtagccctcagtgactatgaccaagtgggacctcctgtatatggcagcagtcggcctctcttgaacaagatgatgcaaagcaaagagttatttgaggctacgattcggcaaccatgcttctgcgatactcctttcgtcctggtactcaacaagtatgacctctttgaggagaagatcaaccgcgcacctctaacgacctgcgagtggttcaacgacttctccccggtgcggacacaccacaacaaccagtcgctcgcccagcaggcgtactactacgtagcggtgaagttcaaggacctgtactacgagcacacgggccggaagctcttcgtgtggcaggcgcgtgcccgtgaccgccagacggtcgacgaggcgttcaagtacgtgagggagatcctccggtgggaggatgagaaagaggagaacttgtatggcggcggggaagactcgttctacagcaccacggaaatgagctcctctcctttcatccgagcagaatga

SEQ ID NO: 262 - protein, 856 aa, Oryza sativa
MAEAVDGGSWEDMLRRILPPGSPIPEAPPNLDYSIALEYDGPPVAYDLPRVDPVEIPTAEPVSGPQRLGNGGGLPVVEPIPLPVSRIARCAEPVSAQVGGGSSDSVNSVLQNEEFDDDDDDSRSLSHDSAQSSPGPQDRSRRTQEGRRGATVTFGFTPDSKCESKEFEEMSEQYVVVTKKEKRRRACYRCGKRKWESKEACIVCDARYCGYCVLRMMGSMPEGRKCVTCIGQPIDESKRSKLGKNSRTLSRLLSPLEVRQILKAEKECQANQLRPEQLIVNGCPLGPDELTDLLSCSRPPQKLKPGKYWYDKESGLWGKEGEKPERIISSNLSFTGKLQANASNGNTQVYINGREITKIELKILKVANVQCPRDTHFWVYDDGRYEEEGQNNIKGKIWESALTRFACALFSLPVPPGNSNETRDEVHYSARTVPDYLDQKRIQKLLLLGPDGAGTSTIFKQAKYLYGTRFTQEELENIKLIIQSNMFKYLGILLEGRERFEEEALSRSNCTISEDEETQQDENKANGSNSCIYSINPRLKKFSDWLLDIIAMGDLDAFFPAATREYAPFVDEMWKDPAIQATYKRKDELHFLPDVAEYFLSRAIEVSSNEYEPSEKDVIFAEGVTQGNGLAFIEFALDDRSPMSEPYIENPEAHSQPLTKYQLIRVSAKGMNDGCKWVEMFEDVRMVIFSVALSDYDQVGPPVYGSSRPLLNKMMQSKELFEATIRQPCFCDTPFVLVLNKYDLFEEKINRAPLTTCEWFNDFSPVRTHHNNQSLAQQAYYYVAVKFKDLYYEHTGRKLFVWQARARDRQTVDEAFKYVREILRWEDEKEENLYGGGEDSFYSTTEMSSSPFIRAE

SEQ ID NO: 263 - DNA, 3270 bp, Oryza sativa
  misc_feature (3252)..(3252): y = cytosine or thymine
atggcgtggtggtcggggaaggtgtcgctcggtggcctgcaggatatcgcaggggccgtgaataagatcagcgagagcgtgaagaacatcgagaagaacttcgacagcgcgctcgggctcgaggagaagcgcgacgatgaggaaggatcaggatcacatgcatctaactctgatagaatagggttctttaatcctgtcatggcattcatgggaaataatggcgaggaggattctgctgaagcatcagaaaagcagcaacctccaaaaagtacaaccgcagaacagagccaaagtgcctccacagaggcgcctacatccaaggtagatgcttctgaagaatcggaatcaacacaatctccaaagccttctgaacaaggagagactcttatcagctcaactgagccacctgtatccaaggctgaggtttctgagcaactagcaacaccaaaaactccaaaatcactttcagcaacagaagaaaagcctagtcattctactgaatcacccacatataaaggggattcagaagcaccacaatctcccacagatccatcaacagcagaagaaaacagtggatccactgagacgggtaatacaattgagacgggaaaccaggatcatcaagagacaaaatattctggtcctaatgatgaagcgccacaaagtcagattggagaatctgacagaggcatacctgatggtacaaagccttcttcacctactgaattagatcaatcaggtaacacgggaacaactgaataccttcatgctggaacggaaaacatagatgataaaaatgccatacaatcacaaccactagattccattctagccagttcagatgatgtaaatgaagctgtgaaaattgttaaaggagctgatgatcgaaatgaaataagcagttcacatgagaatactgacaccgttgaccaagctagtcatgtggaagtcatagaacatgatgagcatactaatgctgctgaaaatgatgaagaagctaatcgaacagaagcacaggtagcaactgttgttgaaagggaggagaatacaatggtgcagcttgaagaccttagctcaatgtccataattgtgagcaatgattcaaactcgcaaaatgagtcggtgcccacttctgcagatgtgcctgttggactggtagaggttggttccaattcaaatgatttgagaaaagaagaaaatatccagggctctgttacaactagcaatcatctggaatctgtcggtgctgtcgctgaacttgagaaattaagacgtgaaatgaagatgatggaagctgcattgcaaggtgctgcaagacaatcccagtccaaagctgatgaaattgcaagactgatgaatgagaatgaacaactgaaatcaacaattgatgatcttaagagcaagtcagctgaagccgaaatggatgcacttaaagatgaatatcaccagagagtagcaactcttgaaaggaaggtgtatgccttgaccaaagaacgggatacattaaggagagagcaaaataaaaaaagtgatgcagctgctcttttgaaagaaaaggatgaaattatcagtcaggtcatggcggaaggttttgaggcatttatttggcatcaacaatttttttacaatgaacaggttcgtgaacttgaagaagaaaaacaacggctgaactcaaagatccaggttgaggagacaaaggttgagagtattaaaagagataaggctgcaacggagaaattgctacaggaaacaatagaaagaaatcaaactgaacttgcagctcagaaggagttctacaccaatgctcttaacgcagctaaagaggctgaggcattagccgaagcaagagtcaacactgaagccaaagttgaacttgagagtcgtttaagagaagcttgtgaaaaagaaaatatcttaattaagacgattgaggagttgaggcatgctctcacaaggcaagaacaggaggctgcattcagggaagaaaggctgaaaagggattatgatgatcttcaaaggcggtatcaatccagtgaacttcgttacaatgaactggtcacacaagttcctgaatccaccagaccacttctaaggcaaattgaagccatgcaggaaacagctgctcgaagggcagaggcttgggctggtgtagagagaaccttaaactctcgacttcaggaagcagaagcaaaagctgctgctgcagaagaaaaggaacggtctgtaaatgaacgtttgtctcaaagctcatcccggataactgttctagagacccagattacaattcttagaacagagcagacacagctgagtcgatctcttgaaaaagagaggcagagagcatccgaaagtagacaggagtacctggcaattaaggaggaggcggcaatgcaagaaggacgggcgaaacagcttgaagaagaaataaaggagcttcgtactaggcacaaaaaggagctgcaagatgcagcagaacacagggagctgcttgagaaggaaaagagctggatgtatgtcattgttttgattggtttggtaacttttatggtataccaatgttgtcctgtcaagttcattaatgtgtggagccttggggaaactgtttttaacctttttaaaccgaccatcagctacaggtccgacataaacattgaactttggaatctctcttacagtaggtccttctcaggatttaacaaaagggaccttgaaagagaaaaggctgccagggcagagcttgagaaaacatcttcccgtgatgcaccaaaaattccgcttccagatcagacaagaaatgctcctctcagaaagctctctagttctggcagtatcaatagtctggaagaaagccatttccttcaagcatcattagatttgtcagacaacgcttcattagagaggagaatgtctgctgaaagtaatatgtcgtattatcttcggagcatgactccaagtgcttttgaatcagcactccgtcagaaagatggagagctagcttcttacacatcgcgtttggcctcattagaatctattcggaattctctggcagaggagttggtgaaaatgactgaacagtgtgagaagttgcgtaccgaggcttctgctctgcctggtttaagggctgagctggaagctttgaaacaaagacactttcaagctctagaactaatgggggaacgtgatgaagagttggaagagctaagaaatgacattgttgacctaaaagagatgtacagagaacaagtggatctycttgttagccaggtttga

SEQ ID NO: 264 - protein, 1089 aa, Oryza sativa
MAWWSGKVSLGGLQDIAGAVNKISESVKNIEKNFDSALGLEEKRDDEEGSGSHASNSDRIGFFNPVMAFMGNNGEEDSAEASEKQQPPKSTTAEQSQSASTEAPTSKVDASEESESTQSPKPSEQGETLISSTEPPVSKAEVSEQLATPKTPKSLSATEEKPSHSTESPTYKGDSEAPQSPTDPSTAEENSGSTETGNTIETGNQDHQETKYSGPNDEAPQSQIGESDRGIPDGTKPSSPTELDQSGNTGTTEYLHAGTENIDDKNAIQSQPLDSILASSDDVNEAVKIVKGADDRNEISSSHENTDTVDQASHVEVIEHDEHTNAAENDEEANRTEAQVATVVEREENTMVQLEDLSSMSIIVSNDSNSQNESVPTSADVPVGLVEVGSNSNDLRKEENIQGSVTTSNHLESVGAVAELEKLRREMKMMEAALQGAARQSQSKADEIARLMNENEQLKSTIDDLKSKSAEAEMDALKDEYHQRVATLERKVYALTKERDTLRREQNKKSDAAALLKEKDEIISQVMAEGFEAFIWHQQFFYNEQVRELEEEKQRLNSKIQVEETKVESIKRDKAATEKLLQETIERNQTELAAQKEFYTNALNAAKEAEALAEARVNTEAKVELESRLREACEKENILIKTIEELRHALTRQEQEAAFREERLKRDYDDLQRRYQSSELRYNELVTQVPESTRPLLRQIEAMQETAARRAEAWAGVERTLNSRLQEAEAKAAAAEEKERSVNERLSQSSSRITVLETQITILRTEQTQLSRSLEKERQRASESRQEYLAIKEEAAMQEGRAKQLEEEIKELRTRHKKELQDAAEHRELLEKEKSWMYVIVLIGLVTFMVYQCCPVKFINVWSLGETVFNLFKPTISYRSDINIELWNLSYSRSFSGFNKRDLEREKAARAELEKTSSRDAPKIPLPDQTRNAPLRKLSSSGSINSLEESHFLQASLDLSDNASLERRMSAESNMSYYLRSMTPSAFESALRQKDGELASYTSRLASLESIRNSLAEELVKMTEQCEKLRTEASALPGLRAELEALKQRHFQALELMGERDEELEELRNDIVDLKEMYREQVDLLVSQV

SEQ ID NO: 265 - DNA, 1145 bp, Oryza sativa
atggcggcggcggtggtggcgaacggcgcgagcggcgactcctccaaggccgcgttcgcggagatatacagcaggctcaaggaggagatgctcgaggacccggccttcgagttcaccgacgagtcgctccagtggatcgaccgcgtaatgctctcttccccgtctcgatcctttatgctgggagggatacggatatgctggattacaatgtgctcggaggaaagtgcaaccgcgggatctctgtcattgatagtttcaagatgttgaagggcactgatgttctgaataaggaggagacatttcttgcctgcacccttggttggtgcattgaatgggcttcaagcttattttcttgtgcttgatgatattatggacaactctcaaacacgacgtggccagccttgctggtttagggtgcctcagaggttgggctcattgctgtaaatgatggtattatccttcgcaaccatatttcacgaattcttcaacgccattttaaaggaaagctgtattatgttgatctcattgatttgttcaatgagttgttttgttaggttgagtttaagactgcttcaggtcaattgttggatcttattactactcatgagggagaaaaggatctcacaaagtacaacttgacagttcaccgccgcattgttcagtacaagacagcttactactcattctatcttccgggttgcatgtgctttgctgctatctggtgagaatttggataacttcggtgatgttaagaacattcttgtggaaatggggacatacttccaagttcagcaggatgattatctagattgttatggtgatcctgagtttattggcaagagattggaacggacattgaagactacaagtgctcatggttagttgtgcaagctctcgagcgtgctgacgagaaccaaaagcacattctatttgaaaattatgggaagccagatcctgaatgtgttgcaaaagtgaaggatctgtataaagaacttaatctggagctgcaggccgtatttcatgaatacgagagggagagttacaataagctgattgccgacatcgaagcacatccgaacaaagcagttcagaatgtattgaaatccttcctgcacaagatctacaagaggcagaagtagagctaa

SEQ ID NO: 266 - protein, 378 aa, Oryza sativa
  X_region (141)..(141): Xaa = any naturally occuring amino acid
  X_region (184)..(184): Xaa = any naturally occuring amino acid
  X_region (280)..(280): Xaa = any naturally occuring amino acid
MAAAVVANGASGDSSKAAFAEIYSRLKEEMLEDPAFEFTDESLQWIDRVMLSSPSRSFMLGGIRMLDYNVLGGKCNRGISVIDSFKMLKGTDVLNKEETFLACTLGWCIEWLQAYFLVLDDIMDNSQTRRGQPCWFRVPQXVGLIAVNDGIILRNHISRILQRHFKGKLYYVDLIDLFNELFCXVEFKTASGQLLDLITTHEGEKDLTKYNLTVHRRIVQYKTAYYSFYLPVACALLLSGENLDNFGDVKNILVEMGTYFQVQQDDYLDCYGDPEFIGKXIGTDIEDYKCSWLVVQALERADENQKHILFENYGKPDPECVAKVKDLYKELNLELQAVFHEYERESYNKLIADIEAHPNKAVQNVLKSFLHKIYKRQK

SEQ ID NO: 267 - DNA, 1439 bp, Oryza sativa
atggcgctcaaggtcgtctctttccccggggacttggccgcggtctcattcctcgactccaacagaggaggagctttcaaccagctcaaagagtggacctcccgtttcaaacgagggacagaagagcagtttccctgagaaggacttgctgttcaatgcaacaggctccaccaccagcatggcctggtcgagccgttgttgaacctgggaggaggtcatgggatggccccaagcctatctcaattgttggctcaaccggttctattggcacacagagacattggacatagttgcggagaatccagataaattccgggttgttgctcttgctgctggctccaatgtgactcttctagctgatcaggtataatgattttgtgagcaggtgaaaacattcaaaccaaagcttgttgctgtaagaaatgagtcattagttgatgagctaaaggaagccttagctgattgtgattggaagccagaaattattcctggtgagcaaggtgtcatagagaggttgctcgccacccagatgcagttacagttgttactgggatagtagggtgtgcaggactgaagagcctacagttgctgcaattgaagctgggaaagatatagcattggcgaacaaagagacacttattgcaggtggtccttttgtgcttccccttgcacaaaagcacaaagtgaaaatacttcctgctgattctgagcactctgctatatttcagagtgtatacaaggcttgcccgaaggagcacttcgccgcattattttgactgcatcaggtggtgctttcagtcagggactggccagttgacaagttgaaagaagtaaaagttgctgatgctttaaagcacccgaactggaatatggggaagaagattactgtagattctgctacattattcaacaagagggtttagaagttattgaagcacattatttatttggtgctgaatacgatgacattgaaattgtgatccacccacaatctatcatacactctatgattgaaacccagccaggattcatctgtgttggctcaactgggatggccagatatgcggataccaatcttatacaccatgtcttggccagacagaatctattgctcagagtgcaggctgggttcactgacattcaaagctcctgacaatgtgaaatacccgtcgatggatctcgcctatgcagctggaagagctgggggcaccatgacaggagttctgagtgctgctaatgagaaggctgtggagttgttcatcgatgaaaagatcgggtacctggacatcttcaaggtggtggagctgacatgcgacgctcatcggaatgagctagtaacaaggccatcactggaggagatcatacattatgatctgtgggcgagggagtatgctgccagcctacagccatccactggcctcagccctgtacctgtctag

SEQ ID NO: 268 - protein, 487 aa, Oryza sativa
  X_region (92)..(92): Xaa = any naturally occuring amino acid
  X_region (123)..(124): Xaa = any naturally occuring amino acid
  X_region (170)..(170): Xaa = any naturally occuring amino acid
  X_region (193)..(193): Xaa = any naturally occuring amino acid
  X_region (244)..(244): Xaa = any naturally occuring amino acid
  X_region (306)..(306): Xaa = any naturally occuring amino acid
  X_region (374)..(381): Xaa = any naturally occuring amino acid
MALKVVSFPGDLAAVSFLDSNRGGAFNQLKVDLPFQTRDRRAVSLRRTCCSMQQAPPPAWPGRAVVEPGRRSWDGPKPISIVGSTGSIGTQXTLDIVAENPDKFRVVALAAGSNVTLLADQVXXFCEQVKTFKPKLVAVRNESLVDELKEALADCDWKPEIIPGEQGVIXEVARHPDAVTVVTGIVGCAGLKXPTVAAIEAGKDIALANKETLIAGGPFVLPLAQKHKVKILPADSEHSAIFQXCIQGLPEGALRRIILTASGGAFSRDWPVDKLKEVKVADALKHPNWNMGKKITVDSATLFNKXGLEVIEAHYLFGAEYDDIEIVIHPQSIIHSMIETQQDSSVLAQLGWPDMRIPILYTMSWPDRIYCSEXXXXXXXXCRLGSLTFKAPDNVKYPSMDLAYAAGRAGGTMTGVLSAANEKAVELFIDEKIGYLDIFKVVELTCDAHRNELVTRPSLEEIIHYDLWAREYAASLQPSTGLSPVPV

SEQ ID NO: 269 - DNA, 351 bp, Oryza sativa
atgcagacggctggcgagttcgagctcgccgggtctcttgccaccctcctcttcttctccgctgccacgaaccaccagagcccctcgtcgtcaacctcccagtctcccactgtcactgctgcctccagcggacgggctcgccagccaccgcccctttccctgccagctagctcccggggaagagaggggataagtggaagtccacttacattatcgcggtttgaggatacgattcaaaacgttaacatgagggacctaaagggaacttattcttccccgacaattataccggctctcatgggcctacatgagtcgccaggtggtgtagttgggcctgcattgagtggttga

SEQ ID NO: 270 - protein, 116 aa, Oryza sativa
MQTAGEFELAGSLATLLFFSAATNHQSPSSSTSQSPTVTAASSGRARQPPPLSLPASSRGREGISGSPLTLSRFEDTIQNVNMRDLKGTYSSPTIIPALMGLHESPGGVVGPALSG

SEQ ID NO: 271 - DNA, 1749 bp, Oryza sativa
  misc_feature (1312)..(1312): s = guanine or cytosine
atggcgtcctccgcgccttccgcccccggcctcgcgccggtcgccaagccgccgccgccgccgtccaaggtgaaggtggcgacagcaaccgtgccaaccaatggcaagatcaagcagggtgcgaggccaatgcgtgtctcggcgccgccggtggagccgcggcggcggatgaacccgctccagcggctggcggcggcggcgattgacgccgtggaggaaggcctcgtcgccgggttgctcgagcgggggcacgcgctgccgcgcaccgctgatccggccgtgcagatcgccgggaactacgcgcccgtcggggagcgcccgccggtgagggggctgccggtgtccggccgcctcccggcgtgcctcgacggggtgtacgtccgcaacggcgccaacccgctccacgcgccgcgcgccgggcaccacctgttcgacggcgacgggatgctgcacgccgtgcggctcgccggggggcgcgccgagtcgtacgcgtgccggttcacggagacggcgcggctgcggcaggagcgggagatgggacgccccgtgttccccaaggccatcggcgagctccacggccactccggcgtcgcgcggcttctgctgttcggctcgcgcgcgctctgcggcgtgctcgacgcgtcccggggcatcggcgtcgccaacgccggcctcgtctaccacgacggccgcctcctcgccatgtccgaggacgacctcccctaccacgtccgtgtcacccacgacggcgacctcgagaccgtcgggaggtacgacttccatgggcagctcgacgccgacggcaccatgatcgcgcaccccaagctcgacccggtcaccggcgagctcttcgcgctcagctacaatgtcgtgtccaagccgtacctcaagtacttctacttcaccgccgacggccgcaagtcccgagacgtcgacatccccgtcggcgcgccgacgatgatccacgacttcgccgtcaccgagaactatgccgtcgtccccgaccagcagatcgtgttcaagctccaggagatggtgcgcggcggctcgccggtggtatacgacagggagaaggcgtcgcggttcggcgtgctcccgaagcgcgccgccgacgcgtcggagctccggtgggtggaggtccccggctgcttctgcttccacctctggaacgcgtgggaggacgacgccaccggcgagatcgtggtcatcggctcctgcatgacgccgccggacgccgtgttcaacgagccgtcgcagtcgccggaggaggagagcttccgcagcgtgctctccgagatccgcctcgacccgsgcaccggcgtgtcgcggcggcgcgacgtgctgcgcgacgccgccgagcaggtgaacctcgaggccggcatggtgaaccggcagctgctcggccggaagacgcggtacgcctacctcgccatcgccgagccatggccgagggtgtcgggcttcgccaaggtggacctcgagagcggcacggcggagaagttcatctacggcgaggggaggtacggcggcgagccatgcttcgttccgcgcgccggcgccgcggcggaggacgacggccacgtgctgtgcttcgtccacgacgaggagcgcggcacgtcggagctggtggtggtggacgccggcagcgaggcgatggaggaggtcgcggccgtgaagctgccggggcgcgtgccgtacggattgcacggcaccttcattggcgccaacgagctgcagcgacaagcttag

SEQ ID NO: 272 - protein, 582 aa, Oryza sativa
MASSAPSAPGLAPVAKPPPPPSKVKVATATVPTNGKIKQGARPMRVSAPPVEPRRRMNPLQRLAAAAIDAVEEGLVAGLLERGHALPRTADPAVQIAGNYAPVGERPPVRGLPVSGRLPACLDGVYVRNGANPLHAPRAGHHLFDGDGMLHAVRLAGGRAESYACRFTETARLRQEREMGRPVFPKAIGELHGHSGVARLLLFGSRALCGVLDASRGIGVANAGLVYHDGRLLAMSEDDLPYHVRVTHDGDLETVGRYDFHGQLDADGTMIAHPKLDPVTGELFALSYNVVSKPYLKYFYFTADGRKSRDVDIPVGAPTMIHDFAVTENYAVVPDQQIVFKLQEMVRGGSPVVYDREKASRFGVLPKRAADASELRWVEVPGCFCFHLWNAWEDDATGEIVVIGSCMTPPDAVFNEPSQSPEEESFRSVLSEIRLDPRTGVSRRRDVLRDAAEQVNLEAGMVNRQLLGRKTRYAYLAIAEPWPRVSGFAKVDLESGTAEKFIYGEGRYGGEPCFVPRAGAAAEDDGHVLCFVHDEERGTSELVVVDAGSEAMEEVAAVKLPGRVPYGLHGTFIGANELQRQA

SEQ ID NO: 273 - DNA, 3180 bp, Oryza sativa
atgactgatgatgaggagcagcagtgcagcacagtctattgtaacagaaacctctgcttctggatcatcgggtgtgtgtacacgtcgccagtggatggaatgtatgactatggagccgtgagctggccatggaagaagaaatcatctgacaaatcatctagcgcagatgcttctcaaaattccaatcaagctgagcaggatgacaaagctccaaaatatgtgcagatttcaccagaaacatatgcacaccttactgaatcagaagaacaagtgaaaaccttaaatgaaaaggtgaaggccttgaatgaggacctctctgcggcacagtctgagatcactactaaagatgccctagtgaaacagcatgctaaagttgctgaagaagctgtatcaggttgggagaaagctgaagcggaggcctcagcactgaagcttcagctagaaactgttacattggctaagctagcggctgaggaaagagctgcccatctggatggtgctctgaaagaatgcatgaagcaagtaaggactgtgaaagaagaaggtgagcagaagctacatgatgtagtctttgcaaaaaccaaacagtgggagaagataaaggccgagtttgaagcaaagttacttgagtttgaacaggagctcattagggctggtgctgagaatgatgcactctcaaggtcactcgaggaacggggagaccttttgatgaagattgatgaggaaaaggctcgagcagaggctgaaatcgaagtcttgaaaaacacaattcagtcagagcttgaaatccgcaatgaggaaaagaacatgagtgtgcgctcagctgatgttgcaactaaacagcacatggaggatgtaaagaaaatatcaaaactggaagctgaatgccaaagattacggggtcttgttcgaaagaagttaccagggcctgctgcattagctcaaatgaaaatggaagtggagagcttgggcagagattatggagaaagcaggttgcgacgatcgcctgcaaagaattccagcttccatcgtcctatgtcccctatgtcccctgttcctgattatgcatttgaaaacttacagcacatgcagaaagagaatgagtttctgactgcacgtttgttatccatggaagatgaaaccaaaatgctaaaagaggccttggccaaaaggaatagtgagctgcaaacatcaagaaacatgtatgctaagacagcaggcaaactccgtggcttggaagttcaaatgttgactggtagccaacgtaagagtacttcgaatcccaacatggatatccactttgatggtgcactgagtcaaaatggaagcaacccacctagtatgacctccatgtctgaagatggtgttgatgatgaaggaagttgcactgaatcttgggccaatgctctggtctctgagctctcacacatcaagaaagagaaaggagctaagagcagtgtgacagaaggctccaatcggttggaactcatggatgacttcctagagatggagaaactagcctgtttgtcatctgaagcaaatggacatgtcagtactgttgaaaaaatgaagattgatgatacggaagcttctttgtctggtattactgaaagagatggtgttaaagattcgcagtcagttttggcattgccagggactccatctaataaactgcagctgtctgacagctctccactcttgaaactacagtctagaatatcttccttgcttgattctgaatcaccacagaacaatgctggaaatatactagatagtatcagaaatattctaaaggatattgaagatgaggcagattcatcaaatgatagcaagactcatcatggtgacatggttgaagtagctgacaatggatcactaatgaagcattcaagcagcgggagcaagcatgctatggatcaagaactagtcaatgccattttaaagattcaagacttcgttaagtcacttgaccaagaagtgtccaagttccaagggcagtcttcagattgtgatggtttatgtgacaaaatacagcagttctctgcactagtagagaaagctctatcaaatgagaatgttctaaatgacattgttatgacgctgtctcttatcttgtcaggaaccagtgagattaagttcatgatgttgaaagagaacaccaaagaagctgacaataataatttggattatgttgataaagtgactttacttgaaaataaagtgcagcttgagccactaaaggacagcatttctggtccttgccttcctcgttcatcttctgatccggagattgaaggtcctactgactctggatgtgatgtcaagactgctgtgcagatatgctcatcagaggaattcgagcaacttaaatctgagaagttgaatttggaggcagaattatcaaagtgcaatgaagttatagaagagacaaaatttaggtttaaggagttggagaagagccttgaagagttgacatccaagttggttgccagtgagaaatcaaacagcttggctgagacacagttgaagtgtatggctgaatcctacaagtcacttgagtcaaggaaagctgaattagaaaacgaaataaaagtgctgcagtccaaaatagaagttttgacagctgaacttgatgatgaaagacaaaatcatcaggaggatataacaagatatagagatctcgaggagaagattgaaaggtatgagaacgagaggaattcaatgtgtgtggatgaggatgcagataccaaagcaaagcaggagaaagagatcgcagctgcagcagagaaacttgcagaatgccaggagacgatattgattcttggtcgccaactacaatctatgcgtcctccagcagaatcaatgggttcctcgccaaaccagcgaatggaagatttcctgcaggacgcggctggaacaaccgaaggtgttgaatactcacagaagccaacaggtcaactggatacagatcaggaaatgcatgcatcaggaaatgaatccccagtgaatgggtacaagacacacaatgccccctctgaagcggacggaagccctttcctttcaccaaacggatccaagcgcccaaagcatagatcgagatcatcttcctcaatttctaaccaattgcccgagaaacaaaaccggggtttcagtcggttcttcgccaaggaaaagatctaa

SEQ ID NO: 274 - protein, 1059 aa, Oryza sativa
MTDDEEQQCSTVYCNRNLCFWIIGCVYTSPVDGMYDYGAVSWPWKKKSSDKSSSADASQNSNQAEQDDKAPKYVQISPETYAHLTESEEQVKTLNEKVKALNEDLSAAQSEITTKDALVKQHAKVAEEAVSGWEKAEAEASALKLQLETVTLAKLAAEERAAHLDGALKECMKQVRTVKEEGEQKLHDVVFAKTKQWEKIKAEFEAKLLEFEQELIRAGAENDALSRSLEERGDLLMKIDEEKARAEAEIEVLKNTIQSELEIRNEEKNMSVRSADVATKQHMEDVKKISKLEAECQRLRGLVRKKLPGPAALAQMKMEVESLGRDYGESRLRRSPAKNSSFHRPMSPMSPVPDYAFENLQHMQKENEFLTARLLSMEDETKMLKEALAKRNSELQTSRNMYAKTAGKLRGLEVQMLTGSQRKSTSNPNMDIHFDGALSQNGSNPPSMTSMSEDGVDDEGSCTESWANALVSELSHIKKEKGAKSSVTEGSNRLELMDDFLEMEKLACLSSEANGHVSTVEKMKIDDTEASLSGITERDGVKDSQSVLALPGTPSNKLQLSDSSPLLKLQSRISSLLDSESPQNNAGNILDSIRNILKDIEDEADSSNDSKTHHGDMVEVADNGSLMKHSSSGSKHAMDQELVNAILKIQDFVKSLDQEVSKFQGQSSDCDGLCDKIQQFSALVEKALSNENVLNDIVMTLSLILSGTSEIKFMMLKENTKEADNNNLDYVDKVTLLENKVQLEPLKDSISGPCLPRSSSDPEIEGPTDSGCDVKTAVQICSSEEFEQLKSEKLNLEAELSKCNEVIEETKFRFKELEKSLEELTSKLVASEKSNSLAETQLKCMAESYKSLESRKAELENEIKVLQSKIEVLTAELDDERQNHQEDITRYRDLEEKIERYENERNSMCVDEDADTKAKQEKEIAAAAEKLAECQETILILGRQLQSMRPPAESMGSSPNQRMEDFLQDAAGTTEGVEYSQKPTGQLDTDQEMHASGNESPVNGYKTHNAPSEADGSPFLSPNGSKRPKHRSRSSSSISNQLPEKQNRGFSRFFAKEKI

SEQ ID NO: 275 - DNA, 534 bp, Oryza sativa
  misc_feature (504)..(504): k = guanine or thymine
atggggatcagtcagttgaagaatccgtcagttgaaccccaaattttgttaaggcagagagagagagagagagagagagatgaggaagaggatgtgcgtgcgtgcgtgcggaagctcaccggcggcggaagcaggaggacggcggccggcaccagtagctgctcggcggcggcggcggcggcggcggcgggcggtcaccgtcgcagtagccggatccgccacttccccaccgtccgagtccgcccgcccgctgccaccaccgcggcggccgccactgccgctggatccgggtgggagacggcctccgccgttagatccgggcaggggaccgccagctccgctgaatccgtgcggggggcagccgtccgccgctcccgcccgccgccgcgcgcacgctgccaagcccgccgctcccgcccgctgtcaccggatccgacggaggcgaagagaccagagccggaggagaaggagaaagaggcggcgccggcgccatggcccgcgggktgcgagctcgacgcggccgcgcggtgctag

SEQ ID NO: 276 - protein, 177 aa, Oryza sativa
MGISQLKNPSVEPQILLRQRERERERDEEEDVRACVRKLTGGGSRRTAAGTSSCSAAAAAAAAGGHRRSSRIRHFPTVRVRPPAATTAAAATAAGSGWETASAVRSGQGTASSAESVRGAAVRRSRPPPRARCQARRSRPLSPDPTEAKRPEPEEKEKEAAPAPWPAGCELDAAARC

SEQ ID NO: 277 - DNA, 3436 bp, Oryza sativa
atggccgccgccgcctcctcctcctcgccgccggggaccgcctccccggtgctcagcgtgcggatcgtctccctcgactactacatggcgccgcccctccccggattcgacttctcctacagccacttccacggtggcggagaggtggaggaggtgccggtgatcaggatctacggctccacccccgcggggcagaagacttgcctccacatccatcgggttcgagcaaaaaagttgtatggctatcatacatctgaggaactttttgtgaagatttatttgtatccaggtgctgttcttaatagagtattccaaccttatgagtcccacattccatatcttcttcactttttggactacaacttgtatggaatgggctatgtacatgttacagacttcaagttccgccctccattgccaaagatgtacacttccctttcacaagctacagcagatagcaaaatagttcggtcacttttatcaatttgggaggatgctgaagctcttggccttctaagctggctggcctcctcacaagctgcagaagaaccaacaactgatgatgagttggtcaatgaagccattcttagccctttattttccaagaagtccattgcagttgccttagagtctgcacagctggattttgatggtgcttctcagcaggagtgccaggatattcttgattcattgggtgttccaactcatttccaaaatgatggatcagccttatatttgctgacacatgcattttcgccaccatccactgtagccgtgggccagtggctaacccaacaatcttgttctacacctctcagtcaaattggattctgtgatcctgctagtattggtggcggacagcaactgactataattagcatagaggttgtaccacattcttttttcttttgttcccgacgaaagcagaggagagctgcgtcctgatccacgatttgatgccatcaatgctgtatcgctggccgttgaggatgatgctgacaatactattgaagttcatgtgcttagaaacctggatggagtttccggttgtgacgtaaatgtatttcctggagagagggaacttttgaaccatcttattaatgcaatatgttcaattgatccagatattatagttggatgggagattcagttaggatctttaggattccttgctgaaagagctgctcatctgggtataggcttactgaaaagaatttcaaggacaccaccgcatcagatgaaacatccacctatgaacccagtggacgaatctagtcaggagcttcctggagcatcttcagctgatgatgttattgatgatgccagtgaaaacaattggagtcatgctcatgctagtggtatacatgttgatggacgaatcatactgaacttatggcgtctcatgcgtgcagaagttaaacttaataattactccctcgaggctgtagctaatgaagtcttgaggaggaaggtaccattagtaccaactaagatattgaatcgatggtttgcaacaggttctggacgaggaagatatcgatgcatagaatatgttaataagagatcttctctcaaccttgaaatattaaatcaacttgacctgaaccggacatctgaacttgcccgtgtatttggtattgatttcttctctgttctttctcgaggttctcagtttcgtgttgaatctatgctcttgagattggttcatacacaaaactaccttgcaatttcccctggaaatcaacagcaggttgcttctcagccagccatggaatgcttgccacttgtaatggaaccagagtcagctttctactctgacccagttgttgtattggattttcaatccctttatccctccatgataatagcatataacttatgttattccacatgcttgggtaaagttttcccgtcaaagtcaagtgtacttggtgtcagctcatattcagcagatccacagaaaattgctgacctgaaaaatcagctgctgctgactccaaatggtgtcctgtacgtgcaacctgaggtcaggaaaggtgtgcttcctcgccttctcgaagagatactatcaacaagaattatggtgaagaaagcaatgaaaaagctgtctgcatctcagaaggttctgcagcgggtattcatttttaatgcacgccaacttgctctgaagctgatagctaatgtaacatatggttacacagctgctggattcagtggtcgtatgccctgtgcagagattgcagacagcattgttcagtgtggccgtagaacacttgaaacagctatatcattcgttaaccagcaccctttgtggaaagctagagttgtatatggtgatactgacagagcatgtttgttcttctaaaagggcgctctagggaagaagcatttcgaataggaaaggagatcgcctcttcaataactgcaatgaatccggatccagtcacattgaagtttgagaaagtctatcacccatgttttcttcttacgaaaaaaagatatgttgggtatagctacgagagtcctgaacagaaagagcccatctttgatgcaaagggaattgaaacagtgcggagagatacatgcccagcagttgcaaagattttagagcaatctattagaataatgtttgaagaacaagacttagccaaagttaggtcatatttggagcgtcaatggacacggatactatcagggaaaatttctattcaagatttcgtttttgctaaggaggttcgcctaggtacttatagtgcaagggcttcctcgctgccacccgcagcaattgttgcaacaaaagcaattctatctgatcctagggcagaacctcgctatggggagagagtgccatatgttgtaatccatggagaaccaggtgctcggcttgtagatatggttattgatccttatggcctgctagaagttggatctccatatagattaaatgcactatattacataaccaaacagataatccctgcattgcaacgtgtttttggactcgttggtgctgacctgaataagtggtttaatgagatgcctcgcccaataagggaaacacttgctaaacgacagtcagcatctggtcatgaggatagatacttactatatgtcaagccactgtataatttgtggtgaaataattcaaggatcagacacattttgcaacaactgcttgagaaatgaagctgttgtcggcacaatagttgctggcagaacttccaaattggagcgggaaattcagcatcttgctgctgcccagatatgtggtcactgcggaggggcagattggattgttgaaagtgggatcaagtgcatttcccttgcatgcccagtgttctttgagcggagaaagattcaaagggagttgaggggtgtttcagaatcagcaatagaagctgggtattatcccttctgttgtccagaactcttctga

SEQ ID NO: 278 - protein, 1148 aa, Oryza sativa
  X_region (535)..(535): Xaa = any naturally occuring amino acid
  X_region (637)..(639): Xaa = any naturally occuring amino acid
  X_region (786)..(786): Xaa = any naturally occuring amino acid
MAAAASSSSPPGTASPVLSVRIVSLDYYMAPPLPGFDFSYSHFHGGGEVEEVPVIRIYGSTPAGQKTCLHIHRVRAKKLYGYHTSEELFVKIYLYPGAVLNRVFQPYESHIPYLLHFLDYNLYGMGYVHVTDFKFRPPLPKMYTSLSQATADSKIVRSLLSIWEDAEALGLLSWLASSQAAEEPTTDDELVNEAILSPLFSKKSIAVALESAQLDFDGASQQECQDILDSLGVPTHFQNDGSALYLLTHAFSPPSTVAVGQWLTQQSCSTPLSQIGFCDPASIGGGQQLTIISIEVVPHSFFFCSRESRGELRPDPRFDAINAVSLAVEDDADNTIEVHVLRNLDGVSGCDVNVFPGERELLNHLINAICSIDPDIIVGWEIQLGSLGFLAERAAHLGIGLLKRISRTPPHQMKHPPMNPVDESSQELPGASSADDVIDDASENNWSHAHASGIHVDGRIILNLWRLMRAEVKLNNYSLEAVANEVLRRKVPLVPTKILNRWFATGSGRGRYRCIEYVNKRSSLNLEILNQLDLXNRTSELARVFGIDFFSVLSRGSQFRVESMLLRLVHTQNYLAISPGNQQQVASQPAMECLPLVMEPESAFYSDPVVVLDFQSLYPSMIIAYNLCYSTCLGKVXXXFPSKSSVLGVSSYSADPQKIADLKNQLLLTPNGVLYVQPEVRKGVLPRLLEEILSTRIMVKKAMKKLSASQKVLQRVFIFNARQLALKLIANVTYGYTAAGFSGRMPCAEIADSIVQCGRRTLETAISFVNQHPLWKARVVYGDTDXSMFVLLKGRSREEAFRIGKEIASSITAMNPDPVTLKFEKVYHPCFLLTKKRYVGYSYESPEQKEPIFDAKGIETVRRDTCPAVAKILEQSIRIMFEEQDLAKVRSYLERQWTRILSGKISIQDFVFAKEVRLGTYSARASSLPPAAIVATKAILSDPRAEPRYGERVPYVVIHGEPGARLVDMVIDPYGLLEVGSPYRLNALYYITKQIIPALQRVFGLVGADLNKWFNEMPRPIRETLAKRQSASGHRIDTYYMSSHCIICGEIIQGSDTFCNNCLRNEAVVGTIVAGRTSKLEREIQHLAAAQICGHCGGADWIVESGIKCISLACPVFFERRKIQRELRGVSESAIEAGYYPFCCPELF

SEQ ID NO: 279 - DNA, 855 bp, Oryza sativa
atggcagtgaaaatggaaaggaagctatcatccaaattaccagaaattcattcagagacgccgcaattgacaggtgccgagaagaaggggaagatggggtgcccgtactccatgccgtcctccatcgctaggcactccagctttccagtgtctagatggtacgagaagcgcccaaacccaaaggaggcgatgaacaccttgcccctccagcacccacccgtggtcgctccccttgccgctcccacgcgaccagagctgaagcccctcgtcctccagcgagccgacgcacagccgcccgtccaccggcatctccccgacacggtacttgtggtgggcgcttggttcccacatcacggccggcgcccgcaggaaggagaactgcagcgtggcggcgtccagagcgagcgcgcaggcgttgttgcagatgtgccagtagaggctcccggcggcacgcacggcgaggtactaaggccagtgggggtcgaactcgatggcgacgtcccgagaccgcggcagcgcgcgccagctgcacacgccgtcgcggtgcgtggcgacccaggcgcgcgggcggtcgtcgtcgacggcgacgcggacggcctcgaagcgcagcccgccgtcgccgggatcatccgcctcggcctcgcgggagaggagtgcggcgccgacaatccggccgtagaggagcggcggcgggtggaaccgggcgtggcggcgggagacggggtcgcagacgaggaaggggcggttgtggtggtggaggaggaggaggccgaggtgggagtcgtagagctcgaagtcggtggcgtcggggaggaagtcgagggagaggcgccgcgaggaggcggtgaccggtga

SEQ ID NO: 280 - protein, 284 aa, Oryza sativa
MAVKMERKLSSKLPEIHSETPQLTGAEKKGKMGCPYSMPSSIARHSSFPVSRWYEKRPNPKEAMNTLPLQHPPVVAPLAAPTRPELKPLVLQRADAQPPVHRHLPDTVLVVGAWFPHHGRRPQEGELQRGGVQSERAGVVADVPVEAPGGTHGEVLRPVGVELDGDVPRPRQRAPAAHAVAVRGDPGARAVVVDGDADGLEAQPAVAGIIRLGLAGEECGADNPAVEERRRVEPGVAAGDGVADEEGAVVVVEEEEAEVGVVELEVGGVGEEVEGEAPRGGGDR

SEQ ID NO: 281 - DNA, 822 bp, Oryza sativa
  misc_feature (32)..(32): r = adenine or guanine
atgggaggcgatcacgcggatcgcggacgtgraccgtcggatgcgtttggacggacggcggatgcgaggggggttttcgatccggaagcggcgggagtaggaggaggcggtttcgtttggatttttttgggagcgcgccaagtggaaattgacccccggatcggtgacgtggttctctcttgtgggtcccggcggtcagtctctctctcgtggtttgagttctttgttcctcgtgggttgaacacgggcttgggcctcttttttcttcttcgcggggttggttacttgggcctcgagactggttttgatttaattggacgccacgccagcattgtctcaccaagtcaaagcaacgccagcatgcatctcactgtggagatgggcaaccgagcaaggaggaggccaggagggagtggcgacgaggaaaacgagcagcggaaggtcggaggcagccggcgtgctccctccctctgtccctggcatcctccctcctccactccccacgagcccatccatggcgagctgttggatcttgaactcgtgctcgccggcgacgaattcaccggtgctcgggagtgcggctacagagggggacctgggggaggggggaggggggatctggaggtcaccagttcttggaagggcgatgcagagggggagatcaagctcaccggcgctcgggggtgcggcaatagaggaggagctcaagctcaccaccggtcactcggggacgagagaaaggaaagaaagagctcaccgccggctgcactgtgtggggtaagagagaaggaggagaggaagagaggaggaagaagaagatga

SEQ ID NO: 282 - protein, 273 aa, Oryza sativa
MGGDHADRGRGPSDAFGRTADARGVFDPEAAGVGGGGFVWIFLGARQVEIDPRIGDVVLSCGSRRSVSLSWFEFFVPRGLNTGLGLFFLLRGVGYLGLETGFDLIGRHASIVSPSQSNASMHLTVEMGNRARRRPGGSGDEENEQRKVGGSRRAPSLCPWHPPSSTPHEPIHGELLDLELVLAGDEFTGARECGYRGGPGGGGRGDLEVTSSWKGDAEGEIKLTGARGCGNRGGAQAHHRSLGDERKERKSSPPAALCGVREKEERKRGGRRR

SEQ ID NO: 283 - DNA, 4416 bp, Oryza sativa
atggcagaggcagtactccttgctctcacaaagatcggtaatgttttagcggatcaagttgccaaggacttgcttgccaaactatctgaaaaagttaataatctaagggatctggatgagaagattgagcaaatgaggatgcaactggcaaccatgaacaatgttatatggaagatcagcatgacatgcctcaccgatgaagttgtcaagggttggattggggaggtgaggaaggtggcctaccgtgttgaggacgtcatggacaaatactcatattactctgtgcaaatggcggaagaatggttccttaaaaaatacttcatcaaaggatcacattatgttttggttttcactcaaattgctgatgaggtagtcaagatagagaaggaaatcaagcaagttgtagaactcaaggataagtggttgccgctatgcccatttgtttctcacccactcactgagatggagagacagaggtcccaagacatcttcccggaacttgtcaaagatgaagatcttgtgggtattgaggacaataggagactgctgacagaatggctatattatgatgagttggacaataaggtgataacggtgtcaggaatgggtggactgggaaaaaccaccctggtcacaaatgtttatgagcgtgaaaagacaaacttctccgctcatgcatggatggccgtgtcacaaacctacacagtcgatgctctgttgaagaagttgcttaggaaagttggttacaaaggtgaaattgacaaaatggatgtttatgatttgaaagaagaaataactcgagtactcaaagataggaaatgcttgattgtactggatgatgtctgggaccaagaagcatactttaaaatatgcgatgcattccagagcaaccaacagagtcgtgtaatcatcacaacacgaaagaatcatgttgcagctcttgcttcctcagcatgccgccttgatctccagccactggatggcaatcaggcctttgatctattctgcagacgggcattttatagcaccaaggaccatgagtgtcccagcgagcttgtggaagttgctgcatctatagtagatcgatgtcagggcctgccactggcgattgtgtcaataggaagcctctttttattctcagaggactacccgatctcccgtgagagccttgtgcgactgtggatagcagaaggatttgtcttgagcaaagagaacaacacaccagaggtggtagcagaggggaatcttatggaactgatataccggaatatgcttcaaattaaagagaatgatgagctaggcagggtgactacctgcacaatgcatgatattgtgcgggacctggccctttctattgctaaagaggagaaatttggttctgcaaatgatttcggcacaatggtacagattaataaggatgttcgtcgtctatcatcttatgaatggaatgatagtgttgctgccactgcaccaaaatttaaacttccacgtcttcgaacactagtatcgcttggagcaatttcatttcccacttatatgttggactcaattttgtcagaatcaagttaccttactgttcttgagctccaagattcagaaatcactcaattgccaaaatctataggcaatatgtttaatctgcgttacattggcttgcgtcgcacaaaggtcaagtcactccctgactctattgaaaagttgtctaatctctacactctggacatcaagcaaaccaaaatagagaagctaccacgtggaatcactaagatcaagaagctaaggcacctgctagctgatagatatgatgatgagaaacattcagagttccggtacttcaaaggcgtgcaagcaccaaaagatctgtctaacttggaagaacttcagactcttgagaccgtggaagctagcaaggacttggccgtgcaactgaagaaactgatgcaactaagaagtgtttggattgacaacataagttctgctgattgtggaaatatttttgctacattatcaactatgccgcttctttctagcttgcttctttctgcaagagatgagaatgaaccactttgctttgaggctctccagcccatgtccaaagaactccacaggtcaattatcagagggcaatgggccaagggcacattggactacccgatatttcttagccacactacacatctcaagtacttagctctaagttggtgtaatcttggggaagatccactggggatgctcgcatcacacttgtcaaacctcacttatctaagactgaacaacatgcacagttcgaaaactttggttcttgatgcagaggcgttcccccacctgaagactcttgtgttaatgcacatgcctgatgtcaaccagataaacatcacggatggcgcccttccatgcattgaaggtttatacattgtatcattgtggaagctggataaagtccctcaaggcattgaatcccttgcctccctgaagaagctctggttgaaggacctgcacaaagacttcaagactcaatggaaaggtgacgggatgcaccagaagatgctgcatgttgcagagatttatttcattgtggccaattttttgagaagggttaacagtctgacggaaagcagcgacgacatttgccaccgattaggttctcaggttgagaaggcacctgcattccaagaattgcgggaagttcttatgagtaactatggcaatctgtctgatcatcttgtcaagacatgcctgctatacatgagtgtattcccaaagggttttgagatcaggagaaacagtctagccaggagatgggtagctgaaggatatgcacagtctgtgggtaaattcacagacgaaacggtggcacatcaaaacttcaagaaactgcttgaccagaatatcatcgagccgatgggtgcatgcgacaatgcaagagtgaagacatgcagaactaatgctgtcatgcgcgagttcatgctgcacagatccttctgtgatcacttcatcgggtctcttgatacaatgtcagagtcagatgacccaagtacctttcgtcatctcttcatccagaattgcacaaatatcaacatcctcaggttggccaagaagaaacttcgtgcccgttctctgacaatctttgggagtggaggaggaggagctgtttcttgtatgagagatgctccggccttagatctaaaagaatgcaatgattttgatgataatcgtgtcaagggcatcatgaaggacaatctcagtcgtctaaaatatctgagcctcggaagcgctactacgaaacttccaaaggcgattgagaacctacagtgtttacatacactcgaattaagaaagacaaatgtagtggcactgcctatagaagtcataaagctgccccatctagttcacctgtttgggaaggtcaagctcaggaaaaagaggagtattcatgcggtgcaggtaatagatgatatcatctcaaacaaaaaaagtatcggacaaaagagtaagctgcagactctatcaggatttatcatagacaaagactctataattccgcaactgatggttcatatgaggggactgagaaaggtcaagatatggtgtgattattccactggtgaaggtaacactatccacctcaaggaggctattgaaaatatggttatgtacgaaatggacacaggtgttggcgttcgttctctgtcactgtacctcggaaatgccttggagaatcttcttggtcttctaggtgaaacaaatggttttcttaccactctgaaactgcacggcagactgagccaatttcccaagtttgttacgtcgcttacaggcatcaaagagttgtgcctttcatcaactaatctaactgggagtgatttatcaggatcaggcctgggtgatctaccctgcttgctttatctcaaactggtagaatacaaccttgtgggcttcgtcattaaaaaaggggattacccagtcctgcagcgcctatgtctagtggtggagagtcctaatcctatcctacctaaaatcgaagaggaagctttgccagaacttgtttcacttcacctgctttgtgtgcgccttggtgatcttgctggcattaatattagaaaccacacaaatctccaggaagttgctcttgattcagctatcagtatggaaaccataattacttgggaaaatgaagctcggaagcacccaaaaagacccaaggttttgttcttcaaaagggttggcacacccaacactgggtgtacgattctcagaagctgtggcctgtttggaacagcttctagtagaaacagcttttgggaaaagctgcagctgggacaaactcccccaaacagggcctttgtcttggcaccgtcgctggttgcaacttgcaagcatgtcgatcgtaaagctgttgttccgcaggagctgtaa

SEQ ID NO: 284 - protein, 1471 aa, Oryza sativa
MAEAVLLALTKIGNVLADQVAKDLLAKLSEKVNNLRDLDEKIEQMRMQLATMNNVIWKISMTCLTDEVVKGWIGEVRKVAYRVEDVMDKYSYYSVQMAEEWFLKKYFIKGSHYVLVFTQIADEVVKIEKEIKQVVELKDKWLPLCPFVSHPLTEMERQRSQDIFPELVKDEDLVGIEDNRRLLTEWLYYDELDNKVITVSGMGGLGKTTLVTNVYEREKTNFSAHAWMAVSQTYTVDALLKKLLRKVGYKGEIDKMDVYDLKEEITRVLKDRKCLIVLDDVWDQEAYFKICDAFQSNQQSRVIITTRKNHVAALASSACRLDLQPLDGNQAFDLFCRRAFYSTKDHECPSELVEVAASIVDRCQGLPLAIVSIGSLFLFSEDYPISRESLVRLWIAEGFVLSKENNTPEVVAEGNLMELIYRNMLQIKENDELGRVTTCTMHDIVRDLALSIAKEEKFGSANDFGTMVQINKDVRRLSSYEWNDSVAATAPKFKLPRLRTLVSLGAISFPTYMLDSILSESSYLTVLELQDSEITQLPKSIGNMFNLRYIGLRRTKVKSLPDSIEKLSNLYTLDIKQTKIEKLPRGITKIKKLRHLLADRYDDEKHSEFRYFKGVQAPKDLSNLEELQTLETVEASKDLAVQLKKLMQLRSVWIDNISSADCGNIFATLSTMPLLSSLLLSARDENEPLCFEALQPMSKELHRSIIRGQWAKGTLDYPIFLSHTTHLKYLALSWCNLGEDPLGMLASHLSNLTYLRLNNMHSSKTLVLDAEAFPHLKTLVLMHMPDVNQINITDGALPCIEGLYIVSLWKLDKVPQGIESLASLKKLWLKDLHKDFKTQWKGDGMHQKMLHVAEIYFIVANFLRRVNSLTESSDDICHRLGSQVEKAPAFQELREVLMSNYGNLSDHLVKTCLLYMSVFPKGFEIRRNSLARRWVAEGYAQSVGKFTDETVAHQNFKKLLDQNIIEPMGACDNARVKTCRTNAVMREFMLHRSFCDHFIGSLDTMSESDDPSTFRHLFIQNCTNINILRLAKKKLRARSLTIFGSGGGGAVSCMRDAPALDLKECNDFDDNRVKGIMKDNLSRLKYLSLGSATTKLPKAIENLQCLHTLELRKTNVVALPIEVIKLPHLVHLFGKVKLRKKRSIHAVQVIDDIISNKKSIGQKSKLQTLSGFIIDKDSIIPQLMVHMRGLRKVKIWCDYSTGEGNTIHLKEAIENMVMYEMDTGVGVRSLSLYLGNALENLLGLLGETNGFLTTLKLHGRLSQFPKFVTSLTGIKELCLSSTNLTGSDLSGSGLGDLPCLLYLKLVEYNLVGFVIKKGDYPVLQRLCLVVESPNPILPKIEEEALPELVSLHLLCVRLGDLAGINIRNHTNLQEVALDSAISMETIITWENEARKHPKRPKVLFFKRVGTPNTGCTILRSCGLFGTASSRNSFWEKLQLGQTPPNRAFVLAPSLVATCKHVDRKAVVPQEL

SEQ ID NO: 285 - DNA, 507 bp, Oryza sativa
atggctgccttgccattagccaccgctgaagtatgtgatgcaaatgcagatttaatcatgaatggtgagcttcgtgctctccagcccatcttccaaatctatggaaggcggcaggtttttgctggccctattgtgacactgaaggtctatgaggacaatgttcttatccgtgagttccttgaggagaagggtcatggaagggttctcgtggttgatggtggtgggagcttgcgctgtgccattttgggtggcaaccctgtgcagcaggcacagaacaatgggtgggctggcatcgtcgtcaatggttgcatcagggacgtggatgaaatcaatggctgtgacattggtgtccgggctctgaactcacatcctatgaaggcaaacaagaagggaataggtgagaagcatgtgcctgtgaccatcgcagggaccaggatttgcgacggtgagtggctctatgcagataccgatggcattctcatctcgaggactgaattgactgtgtaa

SEQ ID NO: 286 - protein, 168 aa, Oryza sativa
MAALPLATAEVCDANADLIMNGELRALQPIFQIYGRRQVFAGPIVTLKVYEDNVLIREFLEEKGHGRVLVVDGGGSLRCAILGGNPVQQAQNNGWAGIVVNGCIRDVDEINGCDIGVRALNSHPMKANKKGIGEKHVPVTIAGTRICDGEWLYADTDGILISRTELTV

SEQ ID NO: 287 - DNA, 833 bp, Oryza sativa
atggcgggcggcggcggcgagtacctgcgccagttcgtcgaggagacggcctggtacaacgagatcttcctcagccatgtggtcccgggcgactggtggcgcgccctcccccacccgctccagtcgtggctccgcaacggcctcggcggctacctcatctacttcgcctgcggcttcctctggtgcttcgtcatctactactggaagcgccacgcctacatccccaaaggattctatacctacaatcgaagctatgaagaagcaaataattgttgcatcaaaggctatgcctctctattgtgcccttccaaccttatctgagtacatggttgagaatggatggacacagtgttatgttaatatcagtgaagttggttggccaatgtacctggtttatctggctttatatcttatctttgttgagtttggaatttactggatgcacagagagttgcatgacataaagccattgtacaagtacctgcacacataccaccatatttacaacaaggagaataccctatcaccatttgcagtttccaggactagcattccatccactggatgggattttgcaagccataccgcatgtgtttgcgctctaccttatcccaacacacttcaggacacacattgctctcttgttcatagaggccgtgtggacaactaacatccatgactgcattcacggcaaggtttggccggtcatgggtgctggctatcacaccattcaccatacaacataccgtcacaactatggccactacaccgtgtggatggactggatgttcggcacccttcgagagccagaagatatcttgaagaaggattag

SEQ ID NO: 288 - protein, 222 aa, Oryza sativa
WRAAAASTCASSSRRRPGTTRSSSAMWSRATGGAPSPTRSSRGSATASAATSSTSPAASSGASSSTTGSATPTSPKDSIPTIEAMKKQIIVASKAMPLYCALPTLSEYMVENGWTQCYVNISEVGWPMYLVYLALYLIFVEFGIYWMHRELHDIKPLYKYLHTYHHIYNKENTLSPFAVSRTSIPSTGWDFASHTACVCALPYPNTLQDTHCSLVHRGRVDN

SEQ ID NO: 289 - DNA, 1566 bp, Oryza sativa
atgacaagttattacatgaagcgctactttaaaaatagaactttctataagattcaatctcaatcactaattgataacccggatcaacggatcaatgatgatctcagtgcattcactggaaccgcgcttgcattttctctgacatttttaaatgctgccgtggacttgatatcattcagtaacatcctttatgggatctatccaccattattcattgttcttattgtctactcccttgggggcactggaattagtatcttccttggtaaattcttgtacggacagaatttggtcaacttgaacttcatgcaagaaaagaaagaagcagattttcgttatggacttgtccgagttagagaaaatgctgaatcaattgctttttatggcggtgaagaaaatgaattgcaacttttgttggatcgattcaggagggcttttgaaaaccttagcttgcaggaattgctaatagcatctcgtaatctggagtttttcaccaatggctaccgttatttaatccagatcctgccagctgcagttgttgctccgatgtacttctcaggaaaaattgaatttggagtaataaatcaatcagtgtctgctttcaatcatatccttagtgatttttctctcattgtgttccagtttcagtcaattagtgcattctcggcggttattgatcgtctagaggtgaatttgatgatctgttggatggaaatggttcatctttatccaagcctgataacattgatgggatcaacataattttcaagagcactggtcctactgtactgagttccaatggatcaccgacacaatctaatccatccatggttcttgagatttgtaatttgacattattaacacccaggagtggaaacattcttattactgacctcactatggaactcaaagaaaaggaccacctactgggtaatggggcccagtggaagtgggaaaacctctttgttacgtgctttggctggcctttggaccagtggtactggggacatcatataccatgtgagaggttccatggagcttcaaacatcaaattcaggtcctgatgagccatccaacatacagtcaaacggtgaagaactgctacaaagttcaaagcagagaagggataatggatggagttggttccaagtctgagatgcccacaactgatgaactgatcagagtacttgaggctgttaagttaggctatatattgcctcgtttcaatggtttggattctatgcatgattgggccagcgttctctctctgggggagcaacagcgtcttgcatttgctcggttgttacttgcaaaaccaactttagtcctccttgatgagtccacaagtgcactagatgatatgaatgagagcgtcatctatacagtcagattgaagctgcagggattacttacataagcattggtcaccggaaaacactgcacaagttccacaacaaggtcttgtacatttcaaattccgattcaacggatagcaacccacgtaattggtacctaaagcccacagaacagatgtcgattgaagagtcatcctcatttgcttcataa

SEQ ID NO: 290 - protein, 522 aa, Oryza sativa
  X_region (229)..(229): Xaa = any naturally occuring amino acid
MTSYYMKRYFKNRTFYKIQSQSLIDNPDQRINDDLSAFTGTALAFSLTFLNAAVDLISFSNILYGIYPPLFIVLIVYSLGGTGISIFLGKFLYGQNLVNLNFMQEKKEADFRYGLVRVRENAESIAFYGGEENELQLLLDRFRRAFENLSLQELLIASRNLEFFTNGYRYLIQILPAAVVAPMYFSGKIEFGVINQSVSAFNHILSDFSLIVFQFQSISAFSAVIDRLXGEFDDLLDGNGSSLSKPDNIDGINIIFKSTGPTVLSSNGSPTQSNPSMVLEICNLTLLTPRSGNILITDLTMELKEKDHLLGVMGPSGSGKTSLLRALAGLWTSGTGDIIYHVRGSMELQTSNSGPDEPSNIQSNGEELLQSSKQRRDNDGVGSKSEMPTTDELIRVLEAVKLGYILPRFNGLDSMHDWASVLSLGEQQRLAFARLLLAKPTLVLLDESTSALDDMNESRHLYSQIEAAGITYISIGHRKTLHKFHNKVLYISNSDSTDSNPRNWYLKPTEQMSIEESSSFAS

SEQ ID NO: 291 - DNA, 1563 bp, Oryza sativa
  misc_feature (354)..(354): m = adenine or cytosine
  misc_feature (776)..(776): m = adenine or cytosine
atgcgctcccgatctctcctcctcgtcgccctcgccacccttcttctccacgcctccgcctccgcctccgacgacgacctcgactacctcatcgacaacgccgacgacatccccgccaacgaccccgacggctggctccaggagggctcccccgacgacgacgacgacgacgacctcttccaccatggccaggcccaggaccatcccatagatgagacccacgtcttcctcctctccgccgccaacttctccgacttcctcgcctcccaccgccatgtcatggtcgagttctacgccccctggtgcgcccattgccaggcgctcgccccagactacgccgccgccgccgccgamctctcccctcttgcccatcaagtcgccctcgccaaggtcgacgccaccgaggacactgatctcgcccagaagtacgacgtccagggcttccccaccatcctcttcttcatcgacggcgttcccaaggactacaacggcgcaagaaccaaggaagccatcgtgtcgtgggtcaacaagaagctagctcccggggtgcaaaacatcaccaccgtcgacgaggcggagaagatactcaccggggaggacaaggccattcttgccgtcctcgactccctatcgggtgctcacagtgatgagattgctgctgcttcgaggctggaagatgctatcaacttttaccagacttccaatcctgatgttgccaagctttttcaccttgacccagcggccaagcgcccgtccttagtcctgctcaagaaacmagaaggaggagaaattttactatttgttgttgcaaacgaatcgtcgaaatttctgcccatctttaaggaagcatcaaaatcattcaaggggaagcttttgtttgtctttgtggagcgtgacaatgaggaagtaggtgaaccagttgccaactactttggtattactggacaagagaccacagttcttgcttacactgggaatgaagatgctaggaattttttccttgatggtgaaatatcgagatttgctgaggatttcttagaggaaaagctcacaccgttctacaagtctgaacctgtacctgaatctaatgaaggagatgtcaaaattgttgttggaaaaaacctagatcagattgttttggatgaatcaaaagatgcccttttggaggtatgttcttcctggaagatatatgcaccatggtgtgggcattgtcaggaactggagcctacctacaacaagctaggaaagcatctccgtggcattgactcccttgtaatagctaaaatggatggcactgccaatgagcatccacgtgcaaagcctgatggattcccaacgatcctcttttatccagcaggaaagaaaagttttgagcctattacttttgagggggaccgtacggtggtggagatgtacaagtttatcaagaagcacgctagcatccctttcaaactgaagcggccggattcgtcagcaacgaaaacagagaaggatcagagcacagcttcaactaatttgaggggggagaggagttccggtacaaatttcaaggatgagttgtag

SEQ ID NO: 292 - protein, 520 aa, Oryza sativa
MRSRSLLLVALATLLLHASASASDDDLDYLIDNADDIPANDPDGWLQEGSPDDDDDDDLFHHGQAQDHPIDETHVFLLSAANFSDFLASHRHVMVEFYAPWCAHCQALAPDYAAAAAELSPLAHQVALAKVDATEDTDLAQKYDVQGFPTILFFIDGVPKDYNGARTKEAIVSWVNKKLAPGVQNITTVDEAEKILTGEDKAILAVLDSLSGAHSDEIAAASRLEDAINFYQTSNPDVAKLFHLDPAAKRPSLVLLKKQEGGEILLFVVANESSKFLPIFKEASKSFKGKLLFVFVERDNEEVGEPVANYFGITGQETTVLAYTGNEDARNFFLDGEISRFAEDFLEEKLTPFYKSEPVPESNEGDVKIVVGKNLDQIVLDESKDALLEVCSSWKIYAPWCGHCQELEPTYNKLGKHLRGIDSLVIAKMDGTANEHPRAKPDGFPTILFYPAGKKSFEPITFEGDRTVVEMYKFIKKHASIPFKLKRPDSSATKTEKDQSTASTNLRGERSSGTNFKDEL

SEQ ID NO: 293 - DNA, 1285 bp, Oryza sativa
  misc_feature (129)..(129): s = guanine or cytosine
atggcggcggcggaggaggggcagtgggtgctcatggccaccggccgatctcccaccaacatcgccgtcatcaagtactgggggaagagggacgaggcgctcatcctccccgtcaacgacagcatcagsgtcaccctcgaccccgaccacctttccgccaccaccaccgtcgccgtcagcccttccttcccctccgaccgcatgtggctcaacggcaaggagatctccttgtcaggagggaggtttcagagctgcctgagggagatccggaagcgtgctcaagatgtcgaggatgagaagaaggggatcaggatcaagaaagaggactgggggaagctacatgtacacatagcatcgttcaacaacttccccactgctgctggtttggcctcttcggctgctggcttggcttgttttggttttcacccttggaaagctaatgaatgtgaaagaagatcatggtgaactttcttccatagcaagaggcaagggtctggaagtgcatgccgcagtatatatgggggattcgtgaaatggtgtatgggaaaagatggaagcgacagcatagctgtacaacttgctgatgaggcacactggaatgatcttgttattatcatagcggtggaaacaagtagcactagtgggatgcgagacagtgttgaaacaagtccccttttgcaatatagggcccaggtagttccagaacgggtgttgaaaatggaagaggctatcaagtctcgtaattttgagtcctttgccaggttaacttgtgcagatagcaaccaatttcatgctgtatgtttggacacgagccctcccatcttctatatgaacgatacatcacacagcacaggataattagccttgtggagaagtggaaccagtcagaaggaaccccacagcaggttgcttacaccttcgatgctgggcccaatgctgtcctaatcgcaccaaaccgcaaaaatgcaaccattctccttcagaagctcttgtattatttccctcctcaagataatgatctcagcagagctatatggttggcgacaagtcgattctaagcgatgctggactgaaatcgatagaagatgtggaggccctcccagctcctgccgagacgaagatgccgagccaaaaattcaagggagatgtgagctacttcatctgtagcaggcttggagctggcccaaaagttgtcactgacgaaagcctagcattgatcgattcggtcacggggctccccaagggagtgtagctgaaactatgtcattcggagagtttgtactga

SEQ ID NO: 294 - protein, 426 aa, Oryza sativa
  X_region (43)..(43): Xaa = any naturally occuring amino acid
  X_region (94)..(94): Xaa = any naturally occuring amino acid
  X_region (99)..(99): Xaa = any naturally occuring amino acid
  X_region (161)..(161): Xaa = any naturally occuring amino acid
  X_region (183)..(184): Xaa = any naturally occuring amino acid
  X_region (214)..(219): Xaa = any naturally occuring amino acid
  X_region (240)..(240): Xaa = any naturally occuring amino acid
  X_region (292)..(292): Xaa = any naturally occuring amino acid
MAAAEEGQWVLMATGRSPTNIAVIKYWGKRDEALILPVNDSIXVTLDPDHLSATTTVAVSPSFPSDRMWLNGKEISLSGGRFQSCLREIRKRAXRCRGXEEGDQDQERGLGELHVHIASFNNFPTAAGLASSAAGLACLVFTLGKLMNVKEDHGELSSIAXRQGSGSACRSIYGGFVKWCMGXXKDGSDSIAVQLADEAHWNDLVIIIAVETSXXXXXXSTSGMRDSVETSPLLQYRAQXVVPERVLKMEEAIKSRNFESFARLTCADSNQFHAVCLDTSPPIFYMNDTSHXHRIISLVEKWNQSEGTPQQVAYTFDAGPNAVLIAPNRKNATILLQKLLYYFPPQDNDLSRSYMVGDKSILSDAGLKSIEDVEALPAPAETKMPSQKFKGDVSYFICSRLGAGPKVVTDESLALIDSVTGLPKGV

SEQ ID NO: 295 - DNA, 369 bp, Oryza sativa
  misc_feature (43)..(43): s = guanine or cytosine
  misc_feature (46)..(46): y = cytosine or thymine
  misc_feature (156)..(156): k = guanine or thymine
atggagcaaccggagctcaatgttgatgggccaaccacccccsgcytccccgagctcatgacaacaagatttagccacctccgaagcacgtggatgtcggatctgattgcccctgagccagccgcctgcatggaattatgtttgtcccattttagkttttttttttttgctgaggtcgagtacatggagatatggagcgaccttgctcaacaagaagcggcgcggctaagggatggatgggtgtggaggggaggcggcaatttggggagggggaggtggggatggggaagagctgacaccaacaccctcgtcactgatgcgctcgctaacggtgtgcaactacgtgttgctacaggcggtggtggttga

SEQ ID NO: 296 - protein, 122 aa, Oryza sativa
MEQPELNVDGPTTPGVPELMTTRFSHLRSTWMSDLIAPEPAACMELCLSHFSFFFFAEVEYMEIWSDLAQQEAARLRDGWVWRGGGNLGRGRWGWGRADTNTLVTDALANGVQLRVATGGGG

SEQ ID NO: 297 - DNA, 1191 bp, Oryza sativa
  misc_feature (546)..(546): r = adenine or guanine
atggccaccttctccggcaccgaccgcctccgcgacctccacgccttcgacgacaccaaggccggcgtcaagggcctcgtcgacgccggcgtcaccaccgtcccctacttcttccgccaccaccccgacccactccccgtcgccgcgccgtcggaggccgccgcggccatccctctcatcgacctcgccaaggccgacgtcgaccgtggccacgtcgtctcccaggtgaggtccgccgccgagtcggccgggcttttccaggtggtgaaccacggcgtcgccggggagctcatggacgcgatgctcgcggcggcgcggcggttcaacgagcagcccgcggaggcgaaggcgccctactacaccagggacctcggcagcaaggtccggttcttctgcaacttcgacctgttccagtcgccggcggcgcattggcgcgacacgctgtacgtggagatggtgcccgacgcgccctcgccggaggagatcccgccgccgctcaggggcttcgcggaggagttcgccgcggcggtttggcggctcggcgarcgggtgaccgagctgctctcggaggcgctgggccttccccccgggtacctcgccgagcacgccgggtgcatggacggcatgagcatggtggcgcagtactacccgccgtgcccggagccggagaagacgatgggcacgacgcggcactccgacccgagcttcctcaccgtgctgctgcaggacgagtccggcgggctccaggcggtgctcccgcggcccccggaggagcggtgggtggacgtgcccccggtggccggcgcgctggtggtgaacgtcggcgacctcctccagctggtgtcgaacggccggctccggagcatggagcaccgggtgctgcccaccgccgccagcgcggcgcgggcccgcgtggcggtggcgtgcttcttccggctcgagtactcggcgtcgttgacgaggccgaggtcgtacggcccgatcgtggattccggcgaaggcggcgcgcggcgggcggcggcggtgtacaggagcacgacgccgagggatttcctggcgtacttcaacggcaaggggctcgacgggcggtcggcgctggagcatttcaggattccggaggcggctgcggcttcttccgccgtcgacgtcgtctcctcctccaccaccgccgccgcatccattccacggtag

SEQ ID NO: 298 - protein, 396 aa, Oryza sativa
MATFSGTDRLRDLHAFDDTKAGVKGLVDAGVTTVPYFFRHHPDPLPVAAPSEAAAAIPLIDLAKADVDRGHVVSQVRSAAESAGLFQVVNHGVAGELMDAMLAAARRFNEQPAEAKAPYYTRDLGSKVRFFCNFDLFQSPAAHWRDTLYVEMVPDAPSPEEIPPPLRGFAEEFAAAVWRLGDRVTELLSEALGLPPGYLAEHAGCMDGMSMVAQYYPPCPEPEKTMGTTRHSDPSFLTVLLQDESGGLQAVLPRPPEERWVDVPPVAGALVVNVGDLLQLVSNGRLRSMEHRVLPTAASAARARVAVACFFRLEYSASLTRPRSYGPIVDSGEGGARRAAAVYRSTTPRDFLAYFNGKGLDGRSALEHFRIPEAAAASSAVDVVSSSTTAAASIPR

SEQ ID NO: 299 - DNA, 522 bp, Oryza sativa
atgggggccagggcaggggccttggagcttcttcttcttcttggagggcgaggagggcttcttcttcttggccggcgtcggcacgggggtcgtcgagcttggtggggatggtggcgggcgcttcggcaacgggggaaagaggcgaggcaacgggaacctcgaccgggggagaggaggccggcggcggggtggccttgggccttgggcgccgggacggatgccttagtggacttgatgggtgacgcggtggccgaagccggggtaatgggcgcctgcggagggggccggggtggcgggggtggtcggcacagcggcgggtgtgggcgcgtcttcttggaggagaccagtggcatggtagtcagttctgccgcgggggcgggcggagatggcggcatcgatgtcgagagcaacctcctcctctgctccaacctcgccatctccgcccctccatcgtcgccaacaatagagctcctcacttgggacgacagcggagagacggtggcctggatctgcggggactag

SEQ ID NO: 300 - protein, 173 aa, Oryza sativa
MGARAGALELLLLLGGRGGLLLLGRRRHGGRRAWWGWWRALRQRGKEARQREPRPGERRPAAGWPWALGAGTDALVDLMGDAVAEAGVMGACGGGRGGGGGRHSGGCGRVFLEETSGMVVSSAAGAGGDGGIDVESNLLLCSNLAISAPPSSPTIELLTWDDSGETVAWICGD

SEQ ID NO: 301 - DNA, 1827 bp, Oryza sativa
atggcgacgatcacgacgccaggatatgctcacatacagcggcagcacggcaggtgctcgacgacggcgggaaggcgtggggcgtccaattcggtgagattctccgcgcgcgcggttagctccgtgccgcacgcggcggcggcgtcatcggcgccggcgttcctgccggtgccgttcgtgcctggggccgacgcaccgtcgccgtcggggaagagtgccattggcgtcccgaaggcgccgaggaagggggaggaggggaagaggctcaacttcttccagcgcgccgcggcgatggcgctcgacgcgttcgaggaggggtttgtggcgaatgtcctcgagcgcccgcacgggctgccgagcacggccgaccccgcggtgcagatcgccggcaacttcgcgccggtcggtgagacgccgcccgcgcgcgcgctgccggtgtcggggcgcatcccgcccttcatcaacggcgtctacgcgcgcaacggcgccaacccgcacttcgaccccgtcgccgggcaccacctgttcgacggcgatggcatggtgcacgccgtcaggatacgcaacggcgccgccgagtcgtacgcgtgccggttcacggagaccgcgcggctgcggcaggagcgcgcgatggggcggcccatgttccccaaggccattggggagctccatggccactccggcatcgcgcgccttgctctgttctacgcgcgcgccgcctgcggcctcctcgacccgtcacacggcaccggcgtcgccaacgccggcctcatctacttcaacggcaggctcctcgccatgtcggaggacgacctcccctaccaggtgcgcgtcaccgccgacggcgacctcgagaccgtcggccgctacgacttcgacgggcagctcggctgcgccatgatcgcgcaccccaagctcgacccggccaccggagagctccacgcgctcagctacgacgtgatcaagaagccgtacctcaagtacttctacttcgcgcccgacggcaccaagtcggccgacgtcgagatcccgctcgaccagcccaccatgatccacgacttcgccatcaccgagaactacgtggtggtacccgaccaccaggtggtgttcaagctccaggagatgctccgcggcggctcgcccgtggtgctcgacaaggagaagacgtcgcggttcggggtgctccccaagcacgccgcggacgcgtcggagatggtgtgggtggacgtcccggactgcttctgcttccacctctggaacgcgtgggaggaggcggacaccgacgaggtggtggtgatcggctcgtgcatgacccccgccgactccatcttcaacgagtccgacgaccgcctcgagagcgtcctcaccgagatccgcctcaacacccgcaccggcgagtcgacgcggcgcgccatcctgccgccgtcgagccaggtcaacctcgaggtgggcatggtcaaccgcaacctcctcggccgcaagacgcggtacgcctacctcgccgtggccgagccgtggcccaaggtgtcgggcttcgccaaggtggacctcgccacgggtgagctcaccaagttcgagtacggcgagggccggttcggcggcgagccctgcttcgtccccatggacgccgccgccgccacgccccgcggcgaggacgacggctacatcctgtccttcgtccacgacgagcgcgccgggacctccgagctcctcgtcgtcaatgccgccgacatgcgccttgaggccaccgtgcagctgccgtcccgcgtgccgtacggcttccacggcacgttcatcaccggcgacgagctcaccacccaggcctga

SEQ ID NO: 302 - protein, 608 aa, Oryza sativa
MATITTPGYAHIQRQHGRCSTTAGRRGASNSVRFSARAVSSVPHAAAASSAPAFLPVPFVPGADAPSPSGKSAIGVPKAPRKGEEGKRLNFFQRAAAMALDAFEEGFVANVLERPHGLPSTADPAVQIAGNFAPVGETPPARALPVSGRIPPFINGVYARNGANPHFDPVAGHHLFDGDGMVHAVRIRNGAAESYACRFTETARLRQERAMGRPMFPKAIGELHGHSGIARLALFYARAACGLLDPSHGTGVANAGLIYFNGRLLAMSEDDLPYQVRVTADGDLETVGRYDFDGQLGCAMIAHPKLDPATGELHALSYDVIKKPYLKYFYFAPDGTKSADVEIPLDQPTMIHDFAITENYVVVPDHQVVFKLQEMLRGGSPVVLDKEKTSRFGVLPKHAADASEMVWVDVPDCFCFHLWNAWEEADTDEVVVIGSCMTPADSIFNESDDRLESVLTEIRLNTRTGESTRRAILPPSSQVNLEVGMVNRNLLGRKTRYAYLAVAEPWPKVSGFAKVDLATGELTKFEYGEGRFGGEPCFVPMDAAAATPRGEDDGYILSFVHDERAGTSELLVVNAADMRLEATVQLPSRVPYGFHGTFITGDELTTQA

SEQ ID NO: 303 - DNA, 2694 bp, Oryza sativa
  misc_feature (1090)..(1090): r = adenine or guanine
  misc_feature (1535)..(1535): k = guanine or thymine
  misc_feature (1543)..(1543): m = adenine or cytosine
  misc_feature (1557)..(1557): m = adenine or cytosine
  misc_feature (1627)..(1627): m = adenine or cytosine
  misc_feature (1647)..(1647): y = cytosine or thymine
atggcgaatcagcagttgttagaggaatccaaagatgaacacagaccattggagtattgcttgcggaagtacctcttgctgctggccattatggtggccacggtgacatatgctgcggggttcaacccgccggggggtgtctggcagaataccgaggccgggcacctcgccggtgagtccatcatccgagatacgtactatccccggtaccttgttttcttctactgcaatgcggctgcatttgctttgtccattgtggtcatcatcctcatcctcatccttgccgtcgtacacgagaaggaagagctatggatctccatgatcccactgcgggtggccatgatgctggatctgcttggcctcgtgggggcctatgctgctgggaccagccggggtgtgctaaaagccaagaatgcctgcgtgttagtcgccatttttgtctatatggctgttcaagttgtgctgacttcattctctgagaaatcacaattgttcagatgcacaggtgatagcaaaaagaaggaagcaaaggggcaactggaatcagctgatggcaaaggggagataaacaaagaggaggaaaaagagcgacgccgcaagctcctgctacttcttgctacatttgtgatgagcatcacatacctggctgggttgagcgcgcctggtggctactgggacagcagcaaggagggccacattgcaggtgacccagtcatgcgggaacaccattctatccgcctgaaggcattcttcacctttaatgctattgcatttgtcatgtccctgctcatcattatgctgctcttagacaagcagctcgtcatcccactactcaagggcaagaatcagaacaaaaccagcccagtacggacctttgtgctcaaagcatacatctttatcgcttttgtcggtcttgcggggcctatgccaccggaagcagccgagaatgtgacactaccatctatgtgggcagtctggtcaaacaatgttgaagaacagacgagcacaggcaattgtagagcacagataaacacaagcaatggtggtgcagagtctctctcaagcaatggtggtgcagagtctgtctcargcaatggtggtgcagagtctgtctcaagcaatgctagagcacagccaaccacaaccaatggtggtgaagagacgaagacaagcaatgctggagcacagaagaacacaagaaatgcagattttatggataaggctcaatctcttgttgtactgctttcaacccttgtagcaaccgtcgcataccaagcaggactggtccctcctggtggtgtttggcaggacaactggaacggacatgaggctggcgattcaatactcctatccatgcaaccagaacgttacagggtattcttttactgcaactcaatagccttcgcagcgtccttggtcatcatcatcttggtccagtataagcctatactcaagctccgcgtactccagtttgccatgatattggatctgtttggcctcattggtgcatactcttctgggagctgccgagatgkggtaatcmaggtccggttggtmaggctcgaagatgaagacatacgaaaggaaggcagggagaaggaccggaaacttgaggacaagagacgcmagaggttgctcctttttgcygtcttgtgtgtgacacttacttaccaagctgggttgaccccaccaggcggattttggctgatggatgatgagtttgggcaccatgcaggtgaccctgtcctcttttacaactatccacgccgttataaggctttcttctactgcaattcaatgagcttcatgtcatcgattgccctaattatactccttgtgaatccgaacctgtacaggccagccatacgaagttatgctctctcagtttgcactgcggtaggcatgtttgcgcttttgtgtgcctatgctgctggaagcactcagcacctgaaaacatccatctatatctttggtttggtgctgttggtattcttcattatgatcgtactcctaatatattcctattggagacagaaaagaatcatgtcacataacaaagaagatacagaaaaaggaaagtcccctggcacacaaaatgaggatatcacaaaacaagacagtaaaacagtgaagcctactgggacaaaatctgatgtagaaatggaagaagatgacataacagcgaagtccactaagttaaaagaaaatgacagcacaggaaagtcctctgaaatagaagatgagggtgaagccaaacaaaatagattagaacattctattgagagagcaaaacaagaaacagccacagagtctcccaagaaagaggacaaatcaaaaaagaaacatgccacacgcaaatacttgatgctgctaggagtcttggctgcaagtgttacttaccaggccggtctcaacccacccggcggtgtgtggcagggaaatagtaatgatcatgcagcagagaaactgctgggggaggcatggtcacttaatgtgatgaacataacgattgtgttggacttacttggcctcctactagcctacatggctggctcaagaatgaggttgcagtcttctggatatttcgtcgtgtttgttataggtgcactaggctttgctgcaattcacaagatttggtcatatttgcaaaggaaaagaaatgatcagcacagactgttagaccaacccagatag

SEQ ID NO: 304 - protein, 897 aa, Oryza sativa
MANQQLLEESKDEHRPLEYCLRKYLLLLAIMVATVTYAAGFNPPGGVWQNTEAGHLAGESIIRDTYYPRYLVFFYCNAAAFALSIVVIILILILAVVHEKEELWISMIPLRVAMMLDLLGLVGAYAAGTSRGVLKAKNACVLVAIFVYMAVQVVLTSFSEKSQLFRCTGDSKKKEAKGQLESADGKGEINKEEEKERRRKLLLLLATFVMSITYLAGLSAPGGYWDSSKEGHIAGDPVMREHHSIRLKAFFTFNAIAFVMSLLIIMLLLDKQLVIPLLKGKNQNKTSPVRTFVLKAYIFIAFVGLAGPMPPEAAENVTLPSMWAVWSNNVEEQTSTGNCRAQINTSNGGAESLSSNGGAESVSGNGGAESVSSNARAQPTTTNGGEETKTSNAGAQKNTRNADFMDKAQSLVVLLSTLVATVAYQAGLVPPGGVWQDNWNGHEAGDSILLSMQPERYRVFFYCNSIAFAASLVIIILVQYKPILKLRVLQFAMILDLFGLIGAYSSGSCRDVVIEVRLVRLEDEDIRKEGREKDRKLEDKRRERLLLFAVLCVTLTYQAGLTPPGGFWLMDDEFGHHAGDPVLFYNYPRRYKAFFYCNSMSFMSSIALIILLVNPNLYRPAIRSYALSVCTAVGMFALLCAYAAGSTQHLKTSIYIFGLVLLVFFIMIVLLIYSYWRQKRIMSHNKEDTEKGKSPGTQNEDITKQDSKTVKPTGTKSDVEMEEDDITAKSTKLKENDSTGKSSEIEDEGEAKQNRLEHSIERAKQETATESPKKEDKSKKKHATRKYLMLLGVLAASVTYQAGLNPPGGVWQGNSNDHAAEKLLGEAWSLNVMNITIVLDLLGLLLAYMAGSRMRLQSSGYFVVFVIGALGFAAIHKIWSYLQRKRNDQHRLLDQPR

SEQ ID NO: 305 - DNA, 2508 bp, Oryza sativa
atggccctcgccttcctgctgggattcctcctcggcctcctggctctggcggcgctcgaggccgccgcgctcctctggctcgtccgccgcctccgccgccgggactctgccccgcagcccgcgccggacgccgacgagctccccggcgaacgccccttcccgtacgagaagcagggctttctgtggatactagagccagaaaagacacctaaagctagtaatgaacgctcatcgattggaggccctaaagaaacaaaggaaaaaaagaatattgtggaggtttttcctgcaaagaggtcggctaaaatcaaggggcgttcacttattttgtctggtcctgatggcttccacacaaccattaagcttctgaattgcacagtatttgctgtttcagcatcaagtatgccctctcgcaaatgggctaaaaggtatcctattaaactggaaagcaaggaatatcaaatttataatggaagcaaggtatgctatctttatgctgaaacttcctgggagaaggaatcatggtgtaaagcacttcgtcttgcagctactgctgacaaggagaaaaagaattggcatgccaagctgagcgaggagttcaataattacatatcatcattaaattctgaatacccaggtttcctaaagcctacagtattttctagtgaggaccatgaggttatggacagggcaataaagactgatgggtcttccaaggtccgtctctttctcaaaaagctggcaaagaaggcatctacaaaggttccgttagagggtaagacaagttccggatcatctacacaaggagaaagaaagatattggataaattacgcagctatcagggcacaccgtttattgaaggattaatgggttcacaagatgacaagtccaatagcagttcatcacaagatacagtgaaacccagtccaacgtctcctgctctgggtcaaattggacaaccttcagctttccctgatgtaaatgccgatgatagaatagcagatgaaggtacactttgttggaaccttttatcttcacggttgttttttgatgctaaaatgagcgatgagatacacaaggccatcaaagcacgcattcagcgaacgttatcaagcatgaggaccccaccttatgttggtgacatcacacttgctgacttcagccttggaaagcttccaccttatgtacacgcgatgagagtccttccactggatttgaatgagttatgggcttttgaagttgattttgaatattctagtggaatactactgcacattgaaacaagactcgaggttcaggaaccagagttacagaaggacataatgaaaagtaactttggtacagactcaaatggagaggttgaatcagatcttcttgagagtattgaacaatacggtaaccaatttcgagattcccaaaattcagtttcctcagttgaagaaaaaggtgaaccagatggtagtcagcccaagagcactggatggacatcggcctatatatcagggtggaaaaatatcatgcattccatagcagatcatgtctcacaggtgccgctctctctggcgataaaaatttcatctgttcgaggtgtcctgcgtgtgcatgtgaaacctcctccttctgatcaactctggtacggatttacatcaatgcctgatttagagtgggacatcgaatcttctattggtgataggaaaattaccaacagtcacattggctcgcttatcggtaacagattcaaggcttcactccgtgacagtttggtgctcccaaactgtgaaagtatttccataccatttatgttggcagaaaaggatgactgggtacctctcaaggatgcaccttttatttggctcaatcgtgagcccactgagaccagaagccacgctgcagccgttacgccaacccggcctgacgaagttattctgaaggatgatgctagtaacaaaactgtggcgccaagtttgcccaattcgtcagcaagaagtgaggaaacacttaaaacagcagcatccattgatgagccaacccaagtgcctgtggcggcagcggatgcatcgcatgagccgaggaagactcccttggctccagctggtgaagcatcgtctccttccagtcctgacacaatcgacgagctgaggaagccattgctgatcacagaaaagattcaggaagaggattctgaaagcaaagtggagtctccctcgcccctgtacacatctctgagggggatagtgcctgcaggggagcaatctggagacgagtcgaagcgaaaaggcggcaggcgagctcggatgatggacttcgggaagaagatgggagacaagctggaggagaagaggcggcacatcgaagagaaggggcggaatatcgtagagaagatgcgcgagaatgccaggaccaacagcttcgatagatggaagagaagttgcgccaggtacatgcgcatgttggcctggttctgccgcgacactcagtacaggtcattcgaggagtacagtcagtaa

SEQ ID NO: 306 - protein, 835 aa, Oryza sativa
MALAFLLGFLLGLLALAALEAAALLWLVRRLRRRDSAPQPAPDADELPGERPFPYEKQGFLWILEPEKTPKASNERSSIGGPKETKEKKNIVEVFPAKRSAKIKGRSLILSGPDGFHTTIKLLNCTVFAVSASSMPSRKWAKRYPIKLESKEYQIYNGSKVCYLYAETSWEKESWCKALRLAATADKEKKNWHAKLSEEFNNYISSLNSEYPGFLKPTVFSSEDHEVMDRAIKTDGSSKVRLFLKKLAKKASTKVPLEGKTSSGSSTQGERKILDKLRSYQGTPFIEGLMGSQDDKSNSSSSQDTVKPSPTSPALGQIGQPSAFPDVNADDRIADEGTLCWNLLSSRLFFDAKMSDEIHKAIKARIQRTLSSMRTPPYVGDITLADFSLGKLPPYVHAMRVLPLDLNELWAFEVDFEYSSGILLHIETRLEVQEPELQKDIMKSNFGTDSNGEVESDLLESIEQYGNQFRDSQNSVSSVEEKGEPDGSQPKSTGWTSAYISGWKNIMHSIADHVSQVPLSLAIKISSVRGVLRVHVKPPPSDQLWYGFTSMPDLEWDIESSIGDRKITNSHIGSLIGNRFKASLRDSLVLPNCESISIPFMLAEKDDWVPLKDAPFIWLNREPTETRSHAAAVTPTRPDEVILKDDASNKTVAPSLPNSSARSEETLKTAASIDEPTQVPVAAADASHEPRKTPLAPAGEASSPSSPDTIDELRKPLLITEKIQEEDSESKVESPSPLYTSLRGIVPAGEQSGDESKRKGGRRARMMDFGKKMGDKLEEKRRHIEEKGRNIVEKMRENARTNSFDRWKRSCARYMRMLAWFCRDTQYRSFEEYSQ

SEQ ID NO: 307 - DNA, 1125 bp, Oryza sativa
atggccattggatccagtggaacatctgtgtacaagacagccacaacaactgaggatatgagctggtggtgttgcattccaaaatccaagaaaggagagaatccttactctcatggcgttagcggtattccgcctgagaaaaacataaggcttttctcttattctgagttgagatcagcaacagaaaacttcaaccgcagtaataaaattggccgaggtggctttgggacagtatacaagggaactattagaaatgggcgagatgttgcggtgaaagttctttctgctgaatccaggcagggcgttcgagaatttttgacagaaattgatgttattaccaatgtgaagcatcccaaccttgttgaattaattggctgttgtgttgaaggaaacaatcgaattttggtatacgagtatttagaaaacagcagccttgaccgtgcattgttgggaatcgccaaaggacttgcatacctgcatgaagagattgcgtcaccgattgtgcacagagatatcaaggctagcaatatacttcttgacaagctttacaaccccaagatcggggacttcggtttagccaagttattccctgataatatcacccacatcagtacccgtgttgctggaacgacaggctaccttgcaccggaatatgcatggcatggccaattgacgaagagagccgatatatacagttttggcgtccttgtacttgagatcgtaagtggcaagagtagttcaaggagtctcctggctgacgataagattctcctagagaaggcatgggagctacatgaggtagggaagctcaaggagctggtggattcagaaatgggagattaccctgaagaggaggtcctccggtacatcaagacggccctcttctgcacgcaggcggcggcggcgcggcggccgtcgatgccgcaggtggtgacgatgctgtccaagcccatccgcatcaacgagcgcgagctcacggcgccgggctacatccacgactacaatggcacggtctccaaggccaccaactccagcaactcgaggttcaagcactcggcgtccgacacctccgacatgttcagcacggtggtgccacccacggtgtccgagatcagcccaaggtga

SEQ ID NO: 308 - protein, 374 aa, Oryza sativa
MAIGSSGTSVYKTATTTEDMSWWCCIPKSKKGENPYSHGVSGIPPEKNIRLFSYSELRSATENFNRSNKIGRGGFGTVYKGTIRNGRDVAVKVLSAESRQGVREFLTEIDVITNVKHPNLVELIGCCVEGNNRILVYEYLENSSLDRALLGIAKGLAYLHEEIASPIVHRDIKASNILLDKLYNPKIGDFGLAKLFPDNITHISTRVAGTTGYLAPEYAWHGQLTKRADIYSFGVLVLEIVSGKSSSRSLLADDKILLEKAWELHEVGKLKELVDSEMGDYPEEEVLRYIKTALFCTQAAAARRPSMPQVVTMLSKPIRINERELTAPGYIHDYNGTVSKATNSSNSRFKHSASDTSDMFSTVVPPTVSEISPR

SEQ ID NO: 309 - DNA, 4149 bp, Oryza sativa
atgtcaggagacaagcaagcttcgaagtcaacagatcctcaacacaagcctccgaatccaattgggtctgaagttcatgaaggaaatattgttccagtcacactagataaattgtcggctgaacataggcaagagcttgagcagatgatgagtagcgttaaggacaagttcatgaattcgttccaacaaacccgtaaagggacaattgtgcagaaatacaagctgaaagtggttgctgccgatgaagttggtccaagctcagctcaaggcgataaaggcatcgctggtgaaccaggcgacaaaggtggtagttttcaggagggcatggttgaagatcttggtccagatggcagtggattacaacaacagttttacaacttccaagatcggattgactatgttgtgcaacatgctttgatcaatcagttaggagtcttagtcaatactttaaccaacatggtgaaaacagtggttgatggcacaatagctgagcatcaagctacacgaccagtgtgtttgccaggtggcgtttttccaaattataggcctttggttacaggcaatcaacagggttcttccaacccaccatcaactcagccgatggcacaggctatagcttctgctccaactgcaccggctgtaacatcatcgggacaaaggcaaatgataaatcctcgactgctaacctgggagcagccgcagcatagtgggcaaaatatcaatcggttgattcaggaacaggtggccgctatgttcttgccaaatccaccagttgtcgatccagcattgccgagccagcaaactccaccaaggcagcagattactcagccgattcaacagcaaagtttgctaaatacatcgtctaggttgaggacacctgataatcagcaaaggcatcatgttgcaactcaagttgtccccgagcatttggttcataatgtgcaaccagatcagtcggttataccccaaattattcctgaacatttgttcaatcactttgagctgatacagcagcagacgcatggggcacctcagcagagacagtgggccgacatgatcacagatgtgatgagggagcaatttgggctgaagccaaaggatactgggaacttatatcggcatccataccctgagtggtttgagagggttccattgcctgcccgtggaattcatgagatgaaactttctgacttgacagcaattcggcaaaggcatgatgaatctgtgcaagattacattcagagatttagagagacaaggaataggtgctacagcttggctctaacagattctcagctagccgatttggcttttcaaagtttgatagctccgattaaagagaaattctcatcccaagagtttgaaagcttatctcaccttgcacagaaggtgactctgcatgagcaaaggtttgcagaagctaagaagaatttcaagaagatcaatcatgtgtatccttacatgtatggttctgacaaagaggatgacaccgaagtagcagcagccgagtgggttagaagcaaaaaggttgtgccatgcccatgggtgaggagttctggaaaagatgaaagatttgactttgatatcaccaaggctgataagattttctacttgttacttcgggagaaacagattcaacttcctgccagtcatattataccatcggctgaggaactaggcaagaggaggtattgcaaatggcataactctggttctcattctactaatgactgcaaagttttcaggcagcagatccaggtggccattgaagggggaaagattaaatttgatgattcgaagaagccgatgaaggttgatggtaatcctttcccggtgaacatggtacatacatctgggaggacagccgatggaggcaaaaatagaaactttcagatgagttcggctagaattatcaacaagtatcagaggaaatacgacaagcagcagcaggaaagtttttcagattctgttggaatgaagaaagttcaagcccgatcttacaatagaagcaatcggccgaggcaaacaagaattcctgttcatcagaggttgggcctagtgaacgaagatcgtgatcaagaagacgatgaggacagaaaaactcaatggtgtccttatggtatttttacaaagaatcagaagagaagggttcaaaggttgaggaatagagaatgttttcgtgaggtagagcaagagatcaaccatcggctgaagaaagcaaagcccaggcaagaatggcgtgttaaaaggcaggatccaacagccgatgaggctaaagccaatgaagcaaagaggctggccaaaggaaagagtgtcgtgactgcatcggttaacatggtttttacactgcctgcggaatttggagctaaacaagccgatgttgatgaagttgaggaagcttcggctaaattggttttgtcaccagagcaagcagtttttgaaaagccagaagggacagagaatcggcatctcaaaccattgtacattaacggttatgtcaatgggaagccgatgtctaaaatgatggttgatggtggggccgctgtgaatttgatgccatatactacgttcaggaagttgggcagaagtgctgaagatctcatcaagacaaatatggttctcaaagactttggtggcaatccatcggaaacaaaaggagttttgaatgtggaactaacaatcggcagcaaaaccgtccctacaacattctttgtcatcgatgggaagggttcctatagcttgttgcttggaagggattggattcatgccaattgttgtattccttcgaccatgcatcaatgcttgattcaatggcaaggcgacaagattgaaatcgtgccagccgacaggtcagttaacaatgctaatgccgatttagctctttgggagatggacggtattgattgcttgtctggaaagacggagagcccaaattattgttttgagggcgtcgtggagggttcaagcgtctacaccaaggatacagtagatgatctcgatgacaagcaaggacaaggtttcatgtcggctgacgatctgaaagaaattgatataggtcctggtgatcgacctaggccgacatttatcagtaagaatttatctcctagattcagaaccaagttgatagagcttttaaaagaatatagagattgcttcgcttgggagtattatgagatgccaggactaagccgatcgattgttgaacatcggcttcctataaaaccgggggctagaccttaccagcagccaccgaggagaagcaaagccaatatgctcgaaccagtcaaagctgaggttaaacatttatatgatgctggtgttattcgtccatgccgatatgctgagtgggtttcaaacatagttccagttatcaagaaaaatggcaaagctagggtgtgcattgattttcgagatctaaacaaagctaccccaaaggacgagtacccaatgccgattgctggtcaattggttgatgccacctcagggcataagatattgagttttatggatgtttacattgatgatgtggtggtcaagtcaaaagaaatagaaaaccatatagccgatttgaggaaggttttcgagagaaccaggaaatatggcctgaagatgaatccgacaaagtgtgctttcagcgtatcggctggtcagtttttgggatttcttgttcatgaaagggggattgagataactcagaggagtgttaatgcaattaagaagattcaacctccggaggacaagacagagttgcaggagttgatcggcaagataaattttgttagaaggtatatatctaatttgtctggaagattagaacctgttacacctctgttgatattgaaagccgatcaagaatttacttggggggcagagcagcagaagactttggataatattaagaaatatcttagctctcctccagttttgatccctccacaaaaggggataccttttagattatatctgtcagctggtgagaagtcaatcggctcggtcttgattcaggagcttgaaagggaaagagagagttgtgttttatttgagccgtcgggttttggatgcagagacaaggtattctcctatggaaaagttgtgtttgtgcttatatttctcttgcacaaggttaaggcattatctattgtccaatga

SEQ ID NO: 310 - protein, 1382 aa, Oryza sativa
MSGDKQASKSTDPQHKPPNPIGSEVHEGNIVPVTLDKLSAEHRQELEQMMSSVKDKFMNSFQQTRKGTIVQKYKLKVVAADEVGPSSAQGDKGIAGEPGDKGGSFQEGMVEDLGPDGSGLQQQFYNFQDRIDYVVQHALINQLGVLVNTLTNMVKTVVDGTIAEHQATRPVCLPGGVFPNYRPLVTGNQQGSSNPPSTQPMAQAIASAPTAPAVTSSGQRQMINPRLLTWEQPQHSGQNINRLIQEQVAAMFLPNPPVVDPALPSQQTPPRQQITQPIQQQSLLNTSSRLRTPDNQQRHHVATQVVPEHLVHNVQPDQSVIPQIIPEHLFNHFELIQQQTHGAPQQRQWADMITDVMREQFGLKPKDTGNLYRHPYPEWFERVPLPARGIHEMKLSDLTAIRQRHDESVQDYIQRFRETRNRCYSLALTDSQLADLAFQSLIAPIKEKFSSQEFESLSHLAQKVTLHEQRFAEAKKNFKKINHVYPYMYGSDKEDDTEVAAAEWVRSKKVVPCPWVRSSGKDERFDFDITKADKIFYLLLREKQIQLPASHIIPSAEELGKRRYCKWHNSGSHSTNDCKVFRQQIQVAIEGGKIKFDDSKKPMKVDGNPFPVNMVHTSGRTADGGKNRNFQMSSARIINKYQRKYDKQQQESFSDSVGMKKVQARSYNRSNRPRQTRIPVHQRLGLVNEDRDQEDDEDRKTQWCPYGIFTKNQKRRVQRLRNRECFREVEQEINHRLKKAKPRQEWRVKRQDPTADEAKANEAKRLAKGKSVVTASVNMVFTLPAEFGAKQADVDEVEEASAKLVLSPEQAVFEKPEGTENRHLKPLYINGYVNGKPMSKMMVDGGAAVNLMPYTTFRKLGRSAEDLIKTNMVLKDFGGNPSETKGVLNVELTIGSKTVPTTFFVIDGKGSYSLLLGRDWIHANCCIPSTMHQCLIQWQGDKIEIVPADRSVNNANADLALWEMDGIDCLSGKTESPNYCFEGVVEGSSVYTKDTVDDLDDKQGQGFMSADDLKEIDIGPGDRPRPTFISKNLSPRFRTKLIELLKEYRDCFAWEYYEMPGLSRSIVEHRLPIKPGARPYQQPPRRSKANMLEPVKAEVKHLYDAGVIRPCRYAEWVSNIVPVIKKNGKARVCIDFRDLNKATPKDEYPMPIAGQLVDATSGHKILSFMDVYIDDVVVKSKEIENHIADLRKVFERTRKYGLKMNPTKCAFSVSAGQFLGFLVHERGIEITQRSVNAIKKIQPPEDKTELQELIGKINFVRRYISNLSGRLEPVTPLLILKADQEFTWGAEQQKTLDNIKKYLSSPPVLIPPQKGIPFRLYLSAGEKSIGSVLIQELERERESCVLFEPSGFGCRDKVFSYGKVVFVLIFLLHKVKALSIVQ

SEQ ID NO: 311 - DNA, 2860 bp, Oryza sativa
atggcgctgtcggcgtccaacagcgagtgcgtgggcgacctggacggggagcagatcaggaaggccaagctgataagcctcggcaggggcgaccgcttcgccgccgtccgggacgacgagcaaaccgcggatgcgctctcccgccgctaccggggactacaactttctgattaccatgagaaagttattgatggcttctatgacatttttggcccctctatggaatcatcaaagcaagggaagatgccatcactagcagatcttcaaacgggcataggcgacctgggttttgaagtcatcgtaatcaatcgtgccattgataccaccttacaggagatggaacaagttgcacaatgtatcctgcttgactttcctgttgcaaatattgcagccttagttcaaagaatagccgagcttgttacagatcacatgggtggacctgtgaaagatgcaaatgacatgctcactagatggctagagaaaagcactgagctaagaacctcactacacacaagtttgttgcctattggctgcatcaagataggtctgtctcgtcaccgtgccctacttttcaagcagattctcgctgatagtgttggcattccttgcaagcttgtcaaagggagtaattatactggtgatgatgatgatgctatcaacataataaagatgaatgaaaggtattgatagggagtttttggttgatctcatggctgctcccggtactcttattccatcagatgtcttaagttggaagggcaactcattaaattctaatgcaagactcacccagaatccattggctgggtcatcaagtacaactgattctaatctcagtgccaatgcattaccacccggacataaaggtggccaactgcctttatttagcagtggcgattggatatcggccagtcaatctggatatgaaaaagatggagccaccacatcttcacaggcctcttcaagtggcacaacatctgttgctgctggaagcgcttttgatagttcttggacattagtttctcatggacaatcagatgatccatcaacctctgctggtatgtcagcacagcagaaagttatacttccaggtggagaacatccatggaatgagaatataaatgcgcgaaatgagaatataaaacttgtttcagatttacaagggaattcagagtccatcaacttatttgccgaccttaatccttttgggggtagggagcccaaaaggacttcagtgccattaaatgggccagataatagaaataatgagttgcaaagacgcagagagaatgtagtccctagcacacgaagaccccagcagcgattagttatgaaaaactggtctccttacaatgatgtttccaacaacaagcagtacaattatgttgaggattcatttgcacgtagaaatattggtgataatgctgcatcatcatctcaggtgccacggccatctgcaaaaaatactaatcttaatgttgtagtgcgcactgatacaccatacatggcagctcataattatgataatagtatggctggttcctctgcaatgaagatgacttctacagctgggattgggaaggttcctgataaggttctgtacggtgatttggacaagggccttactaattctagactgggggatcaaccaccgatagaaagacataaatggggcaattctgtagaaggaaggattccaacaggcacagttcacaatcaagcaaaagaacacaaggagaacttcgatggaaagcaagacaataagaagttacatcctgatccaaagaaatccccacttgacagattcatggacacatcaatgccatcaaggaaccctgaatccgtttcaccatcctttgctaggtcacacaagctagacaccatgttcgacgatgtgtctgaatgtgaaattcattgggaagatcttgtgattggtgaaaggattggcttagcaggttcatatggagaggtgtaccgtgctgattggaatggaacagaagtagctgtcaaagaaattcttggatcaagatttctatggtgatgctttggatgaattccggagtgaagtgcggattatgcgtcgactgcgtcatccaaatattgttctcttcatgggtgctgttactcgtcctccaaacttatctattgtatctgagtatcttccaagcttggcaggggaagcttatataagatccttcaccgtcctaattgccaaattgacgagaagcgtagaattaaaatggcccttgatgtgggccaaaggaatgaattgcctccatattagtgtaccaacaattgttcatcgggatcttaaatcaccaaacttgctggttgacaacaactggaatgtgaagaggtttgtgattttggactttcacgcttgaagcacagtacattcttatcatccaaatccactgctggaactaaacatttactatttctgttttcgatatctcaccagccggagtggatggcacctgaggtcttgcggaatgaacaatcaaatgaaaagtgtgatgtttacagctttggtgtcatcttgtgggaattagcaacacttaggatgccatggagtggaatgaatccaatgcaagttgttggggcagtcggcttccaggacaagcggctcgatattcccaaggaaattgatcctctagttgcaaggatcatatgggaatgctggcagaagggatccaaatttgcggccctcgtttgcacagttaaccagtgctttgaagactgtccaaaggctagtaaccccttctcaccaggagtcccagagccctcctgtgcctcaagaaatatgggtgaattcttccaccccttgatgttgaggggcattccactctcaaaattgtga

SEQ ID NO: 312 - protein, 941 aa, Oryza sativa
MALSASNSECVGDLDGEQIRKAKLISLGRGDRFAAVRDDEQTADALSRRYRGLQLSDYHEKVIDGFYDIFGPSMESSKQGKMPSLADLQTGIGDLGFEVIVINRAIDTTLQEMEQVAQCILLDFPVANIAALVQRIAELVTDHMGGPVKDANDMLTRWLEKSTELRTSLHTSLLPIGCIKIGLSRHRALLFKQILADSVGIPCKLVKGSNYTGDDDDAINIIKMNERYDREFLVDLMAAPGTLIPSDVLSWKGNSLNSNARLTQNPLAGSSSTTDSNLSANALPPGHKGGQLPLFSSGDWISASQSGYEKDGATTSSQASSSGTTSVAAGSAFDSSWTLVSHGQSDDPSTSAGMSAQQKVILPGGEHPWNENINARNENIKLVSDLQGNSESINLFADLNPFGGREPKRTSVPLNGPDNRNNELQRRRENVVPSTRRPQQRLVMKNWSPYNDVSNNKQYNYVEDSFARRNIGDNAASSSQVPRPSAKNTNLNVVVRTDTPYMAAHNYDNSMAGSSAMKMTSTAGIGKVPDKVLYGDLDKGLTNSRLGDQPPIERHKWGNSVEGRIPTGTVHNQAKEHKENFDGKQDNKKLHPDPKKSPLDRFMDTSMPSRNPESVSPSFARSHKLDTMFDDVSECEIHWEDLVIGERIGLAGSYGEVYRADWNGTEVAVKKFLDQDFYGDALDEFRSEVRIMRRLRHPNIVLFMGAVTRPPNLSIVSEYLPSLGRGSLYKILHRPNCQIDEKRRIKMALDVAKGMNCLHISVPTIVHRDLKSPNLLVDNNWNVKRFVILGLSRLKHSTFLSSKSTAGTKHLLFLFSISHQPEWMAPEVLRNEQSNEKCDVYSFGVILWELATLRMPWSGMNPMQVVGAVGFQDKRLDIPKEIDPLVARIIWECWQKDPNLRPSFAQLTSALKTVQRLVTPSHQESQSPPVPQEIWVNSSTP

SEQ ID NO: 313 - DNA, 3530 bp, Oryza sativa
  misc_feature (349)..(349): r = adenine or guanine
atggattcgccgccgccgccgcgggaggaggtggtggtattcgcggtcaacagcgagcgcttcgagctccgccgtgacgggggcgaccccggggagtccctcctcgagttcctccgctcccgcacccgcttcaccggcgccaagctcggctgcggcgaagggttccggggcctgcctggtggtggtctcggcgtacgacgcggaggccgacgaagtggcgcaagcggcggtcagctcgtgcctcaagctggcgcgcggcctccaacaccgcgcggtgaccaccaccgaggggctcgggagcagccggcgcggcctccaagcgctgcacgagcggctcgccggcttccargcctcgcagtgcgggttctgcacgcccggcgtgtgcatgtccctcgccggcgcgctcgcggccgccgaggggaacgggaagaaggccgcctccgccgcggaggggttctcgaggctcacggcggccgaggcggagcgcgcggtggccgggaacctgtgccgctgcacggggtaccgaccgatcgccgacgcgtgcaagagcttcgccgccgacgtggacttggaggatttggggctcaactgcttctggaacaagggcgatgccactgccagtgtctccaagttgccgccttacaaggagaggagcatcgccgcgttcccggagttcttgaaggatgaaaaggtggttgtgggcaacacttcttctggtgtttacagggatgcagagctgtatgataggtacatagacttgagagccattccagaactgaattcgaagattgctgatcacatggagaaagtggcttctcagtttgtccggaacatggcgagcttgggtggaaatctgataatggctcagagggatgagtttgcctctgacattgcaacggttctgcttgctgctggttcatcactgtgcatccagctatttgagacataccgagcttccccacggcctattggaaatgctgtttcataccttaattctgcattcctggctaaattatcttcagatgaaacttcagttggcttttggtgcatatggaacacaacatgctgtcagggctacaaatgttgagagtctcttagtgggtaaacccatcactgcatcactcttactagaagcgtgcacggttctcaagaaaacaattgttccaggggaaggtacaagacatgctgcttacagatcaagcttagctgttgcctttctttttagttttctttatccaataacccttgaatcatccaaacaggtcatcgagatcagtgaagactatctcccggttggcttaccagccaagaaagttggagcagaactacaagcctctgggtgaggctatatatgtggatgacatcccttccccaaaagactgcctgcatggagcatttgtatatagcacaaaacctttagctcatgtgaagagcatagaactgaacccttctctcgagcagctaaaaactgtggcgattgttactgccaaggatattcctaaaggaggcagcaatgttggggccaacactatatttggacctgaacctctgtttggtgatccactcactcagtgggctggggaaccacttggtattgtggtatgggttttacactggctgccagtcgagcattggtcgactacagcatggaaaatttagatgctccaattttatcaattgaggaggctgtgagaagtagtagttattttgaaatcctaccatttcttcttccccaaaagattggtgatttctcaaaaggaatggaagaagctgaccagaaaatatattcaactgagcttcactcgcagtattacttttacatggaaacacaaactgcgctagccatacctgaggaggataactgtatggtcgtgtatagctcaagccagtgcccggaggtagcacaagaaaccattgcaaaatgcctgggtttaccttgtcataatgtccgtgttattactagaagagttggtggtggctttggaggcaaagctgtcagatcgttaccagtggcaacagcttgtgcactttcagcatttaagttgcagcgtcctgtccgaatatatcttgatcgcaagactgacatgataatgactgggggccggcatcccatgaaaatacgctattctgtaggcttcaaatccgatgggaacatcacagcgctacatatagaattgttggtaaatgccggaataacccaggatgttagtccagtgattcctcacaatttcatagaggctctgaagaaatataattggggtgccttctcctatgatgcaagaatctgcaaaacaaacattgcaaccagatccgcaatgcggggtcctggagaagtgcagggttcttatgttgctgaagctattattgagcatgttgctgctgtgctctctactgatgttaatttggtcaggcagagaaatcttcacacagtggagagcctcagtttgtatcatagtgaatgcatggaagatgccttggggtatacacttccctctatctgcaatcagttgattacatcagcaaattaccagcaccaacttgaaatgattcggtccttcaacaaaagcaacagatggaaaaagcgggggctttctgtcgtgccgatagtgcataaattcgcatctcggccaacgcctggtaaagtgtctattcttaatgatggatccgttgctgttgaagttggaggcattgaacttggccaagggctttggacaaaagtgaagcagatggcagcgttcggtcttggacagctttggactgatagaaggcaagaactgttggagagagtgagaattattcaagcagatacactaagtgtgatacagggagggtggaccacagggagtacaacatcagaatctagctgcgaggcagttcatcgtgcctgcaatatcttggtcgacaggctgaaaccactcaaggagcaattgcaagaaaaacaaggaacagtttcatgggatgagcttatttcacagtacgttcccggggcttctggttcctatctaaactatggggcagctgctagtgaggtggtagagattgatcttctgacaggagcgaccacaattttgcgtagtgatcttatatatgattgtggacggagtttaaatcctgctgttgacttggggcagctttttcaggttgaaggggcttttgtccagggaattggttatttcatgaacgaggagtacgtgacgaactcagatgggctgcttgtctcagacgggacttggacatacaagattcctacggtggacaccatcccaaaacagttcaacgttaagctactcaacagtggattccacaagaaacgtgtgctctcttcaaaaggcttctggggagccacctttgctacttgctgcctcggtgcattgtgcaacaaggcagcaagggaggagtatcactgttccaggtctggatcttcacctcccttctttgatcttgaagttcctgccatcatgcccacggtgaaggagctatgcggcttagacaacgtggagaagtatttggagagtatctgctcgaaataa

SEQ ID NO: 314 - protein, 1175 aa, Oryza sativa
  X_region (736)..(736): Xaa = any naturally occuring amino acid
MDSPPPPREEVVVFAVNSERFELRRDGGDPGESLLEFLRSRTRFTGAKLGCGEGSGACLVVVSAYDAEADEVAQAAVSSCLKLARGLQHRAVTTTEGLGSSRRGLQALHERLAGFQASQCGFCTPGVCMSLAGALAAAEGNGKKAASAAEGFSRLTAAEAERAVAGNLCRCTGYRPIADACKSFAADVDLEDLGLNCFWNKGDATASVSKLPPYKERSIAAFPEFLKDEKVVVGNTSSGVYRDAELYDRYIDLRAIPELNSKIADHMEKVASQFVRNMASLGGNLIMAQRDEFASDIATVLLAAGSSLCIQLFETYRASPRPIGNAVSYLNSAFLAKLSSDETSVGFWCIWNTTCCQGYKCESLLVGKPITASLLLEACTVLKKTIVPGEGTRHAAYRSSLAVAFLFSFLYPITLESSKQVIEISEDYLPVGLPAKKVGAELQASGEAIYVDDIPSPKDCLHGAFVYSTKPLAHVKSIELNPSLEQLKTVAIVTAKDIPKGGSNVGANTIFGPEPLFGDHSLSGLGNHLVLWYGFYTGCQSSIGRLQMENLDAPILSIEEAVRSSSYFEILPFLLPQKIGDFSKGMEEADQKIYSTELHSQYYFYMETQTALAIPEEDNCMVVYSSSQCPEVAQETIAKCLGLPCHNVRVITRRVGGGFGGKAVRSLPVATACALSAFKLQRPVRIYLDRKTDMIMTGGRHPMKIRYSVGFKSDGNITALHIELLVNAGITQDVSXPVIPHNFIEALKKYNWGAFSYDARICKTNIATRSAMRGPGEVQGSYVAEAIIEHVAAVLSTDVNLVRQRNLHTVESLSLYHSECMEDALGYTLPSICNQLITSANYQHQLEMIRSFNKSNRWKKRGLSVVPIVHKFASRPTPGKVSILNDGSVAVEVGGIELGQGLWTKVKQMAAFGLGQLWTDRRQELLERVRIIQADTLSVIQGGWTTGSTTSESSCEAVHRACNILVDRLKPLKEQLQEKQGTVSWDELISQYVPGASGSYLNYGAAASEVVEIDLLTGATTILRSDLIYDCGRSLNPAVDLGQLFQVEGAFVQGIGYFMNEEYVTNSDGLLVSDGTWTYKIPTVDTIPKQFNVKLLNSGFHKKRVLSSKGASGEPPLLLAASVHCATRQQEEYHCSRSGSSPPFFDLEVPAIMPTVKELCGLDNVEKYLESICSK

SEQ ID NO: 315 - DNA, 1395 bp, Oryza sativa
  misc_feature (1064)..(1064): m = adenine or cytosine
atggcggcggagaggaaggacgtgggcattctcgccatggacatctacttcccgcccacctgcgtgctccagctggagaatcatgatggcgtgagcaaagggaagtacaccattgggcttggacaggatagcatggccttttgcactgaagtggaagatgttatttccatgaggtgaagtcactcctggaaaactataagattgatccaaaatgtattggacgtttggaagttggcagtgaaacagtaatagacaagagcaagtctataaaaacatggctgatgcaaatatttgagtgcggtaatactgacattgaaggagttgactcctcaaatgcatgctacggtggaacagctgctttatttaattgtgttaattgggtcgagagcaactcatgggatggacgttatgggcttgttgtttgcacagacagcgcggtttacgctgaaggtccggctcgtccaaccggtggtgcagctgctattgcaatgttgattggaccaaatgctccagtttctttcgaaagcaagtatagaggatctcatatggcacatgtctatgacttttacaagcctgatcttgctagtgaatacccggtcgtggtcgatggaaagctatcacagacatgctatctcatggcattagattcctgctacaatgtcttctgcaaaaagaaaagcttgagggaaagcaattttctattcatgatgcagactattttgtatttcactccccatacaacaagcttgtgcagaagagctttgcacgcctatactacaacgattttctgagaaaatgcagtataacgattttttatgcctgttaattagcacggtggaagatggatcaagagaaaaactggagccttattcaggtttgtcatccgaggaaagctaccagagtagagaacttgaaaagtctcagcaagttgcgaagcacctctatgattcaaaggttcaaccaactacattaatcccgaaacaagtcgggaatatgtacacagcgtctctatatgctgctttggcatcagtgatgcataaccaaaatgaaactctggcaggccmaaggattgtcatgttctcatacggcagtggcttgaaatcaacaaagttctctttcaagatcaatgaagggcagcatccattcatcctatcaaacattgcaggcatactggatgtctccaagaaactggagtccaggcatgtggcgccggagaagttcgtggcggcgctgaagctgatggagcaccggtacggcgccaaggatttcacgacgagccaggacacgagcctgctcgctccaggcacctactacctcacccacgtcgactccatgtacaggaggttctacgccgtcaaaggtcaagccgtcaccgaagtgtccaatggccattga

SEQ ID NO: 316 - protein, 475 aa, Oryza sativa
  X_region (25)..(26): Xaa = any naturally occuring amino acid
  X_region (60)..(63): Xaa = any naturally occuring amino acid
  X_region (105)..(105): Xaa = any naturally occuring amino acid
  X_region (232)..(232): Xaa = any naturally occuring amino acid
  X_region (276)..(276): Xaa = any naturally occuring amino acid
  X_region (314)..(314): Xaa = any naturally occuring amino acid
  X_region (363)..(363): Xaa = any naturally occuring amino acid
  X_region (410)..(410): Xaa = any naturally occuring amino acid
  X_region (438)..(439): Xaa = any naturally occuring amino acid
MAAERKDVGILAMDIYFPPTCVLQXXLENHDGVSKGKYTIGLGQDSMAFCTEVEDVISMXXXXVKSLLENYKIDPKCIGRLEVGSETVIDKSKSIKTWLMQIFEXCGNTDIEGVDSSNACYGGTAALFNCVNWVESNSWDGRYGLVVCTDSAVYAEGPARPTGGAAAIAMLIGPNAPVSFESKYRGSHMAHVYDFYKPDLASEYPVVVDGKLSQTCYLMALDSCYNVFCKKXEKLEGKQFSIHDADYFVFHSPYNKLVQKSFARLYYNDFLRNAVXRFFMPVNSTVEDGSREKLEPYSGLSSEESYQSRELEKXSQQVAKHLYDSKVQPTTLIPKQVGNMYTASLYAALASVMHNQNETLAGXRIVMFSYGSGLKSTKFSFKINEGQHPFILSNIAGILDVSKKLESRHXVAPEKFVAALKLMEHRYGAKDFTTSQDXXTSLLAPGTYYLTHVDSMYRRFYAVKGQAVTEVSNGH

SEQ ID NO: 317 - DNA, 1210 bp, Oryza sativa
  misc_feature (173)..(173): m = adenine or cytosine
  misc_feature (183)..(183): k = guanine or thymine
  misc_feature (210)..(210): s = guanine or cytosine
  misc_feature (342)..(342): m = adenine or cytosine
atggcgtcctcctcgtcggcggcggcgctctggacggcggcgccccaaccccacggcagctgcatcaggatccacgccatcttccaccagcgtcaccagcggagggggaagaggccggtcgtcgtcgcctcgtcggtgaggccgctgcaggccgcgagcctggcggtggccamggcgcccgtkgccctggcgtcgaggaggacggcggcsgaggaggccgtctacgaggtcgtgctgcggcaggcggcgctggtggaggaggccacccaacgccgcggcgcgggggcgccgcggtgggcggaggaggacgccgtcgactggggcctcctcctcggcgacgcmtaccaccgctgcggcgaggtctgcgccgagtacgccaagaccttctacctagaggtactcagcttatgactcctgaaaggcgcaaagctgtctgggcaatctatggtatggattaggtatggtgcagaagaactgatgaactggtagatggccctaactcgtcttacattacaccaaaggcacttgatcgatgggagaagagattagaagatctcttcgaaggcaggccatatgatatgtatgatgcagccctctcggacacagtgtcaaagtttccagtagatatccagcagccattcaaagacatgattgaaggaatgaggcttgacctgtggaaatcaaggtataggagctttgatgagctctacctctactgctactacgttgctggcacggttggtctcatgacagtaccggtgatggggattgcccccgactcgaaggcctcaaccgagagcgtgtacaacgctgcgctagctcttgggatcgccaaccagctgacgaatattctcagagacgtaggcgaagaaggaggggaagaatctaccttccattggatgaattggcagaggcaggtctgacagaagaagacatattcagagggaaagtgactgataaatggaggaagttcatgaagggacaaattctgcgtgccaggttattctttgatgaggcggagaagggcgttgcgcatctagactctgcgagtagatggccggttctggcatctttgtggttataccggcagatccttgatgctatcgaagcaaacgactacaacaacttcaccaagcgcgcgtatgtaaacaaggcaaagaagctgctgtctttaccggtcgcttatgcaagagcggcagttgcatcatga

SEQ ID NO: 318 - protein, 402 aa, Oryza sativa
  X_region (58)..(58): Xaa = any naturally occuring amino acid
MASSSSAAALWTAAPQPHGSCIRIHAIFHQRHQRRGKRPVVVASSVRPLQAASLAVAXAPVALASRRTAAEEAVYEVVLRQAALVEEATQRRGAGAPRWAEEDAVDWGLLLGDAYHRCGEVCAEYAKTFYLETQLMTPERRKAVWAIYGMDLVWCRRTDELVDGPNSSYITPKALDRWEKRLEDLFEGRPYDMYDAALSDTVSKFPVDIQQPFKDMIEGMRLDLWKSRYRSFDELYLYCYYVAGTVGLMTVPVMGIAPDSKASTESVYNAALALGIANQLTNILRDVGEERRGRIYLPLDELAEAGLTEEDIFRGKVTDKWRKFMKGQILRARLFFDEAEKGVAHLDSASRWPVLASLWLYRQILDAIEANDYNNFTKRAYVNKAKKLLSLPVAYARAAVAS

SEQ ID NO: 319 - DNA, 972 bp, Oryza sativa
atgacaataggaatgatacagaattctttgaagggcactgataagcacttgcccagtcaggtcagaacagatagcagtggagaagaggagggcagtcgtgcaagagagaatgcacgaaaagcaaattcatcacgcagaaaaattaaggatttctcagcagatctggaactaaagaaagcacatgatgatttgagccctggagaaaaatctccatcacaacatagtggcaaggagacaaggaggaaacagaacaatcaactgtcagagtcatcagaagatgagcgtgatggtagaagaacgaaacacacggttgattctcctgatgattcccaacagaaacagcacactcctagtagagttggaatgcacaactcttattcaaaggatggcatgaacagtgaggatgcaataaagggtttacgtgacggtatggcttctaagaagtatcctgctaaaatcgatgatgattctgagtcagaagatggaagtccttttcgaaaagataagagaaaagcacacggtaataacaacattgattctggcagttcaggttcagaagaatcagggaaacatagatcccattctgagaagcgaaagcataaaaagagccgtaagcataagagacgttatgatgacagttctgatgaatctaattcggagtcagatgacaaagagtccaagaggaggagaaaggaagagaagaggttgcgaaaagaggaaagacggcgcagacgtgaagagcggcaccgtagaaaggcagaccgtcaggccagcaaactaaaactgaagcatgctgaaactgttgatatggcttcagatcttgagaaggatcgtgaatctgactcagatgctgatgctaggaagaaaggttcatataatggaagagacgaatcggatcagcagaaacttgaaattgagcttcgcgagaaggctctggaatctcttagagcaaagaaagccatcaaccactag

SEQ ID NO: 320 - protein, 323 aa, Oryza sativa
MTIGMIQNSLKGTDKHLPSQVRTDSSGEEEGSRARENARKANSSRRKIKDFSADLELKKAHDDLSPGEKSPSQHSGKETRRKQNNQLSESSEDERDGRRTKHTVDSPDDSQQKQHTPSRVGMHNSYSKDGMNSEDAIKGLRDGMASKKYPAKIDDDSESEDGSPFRKDKRKAHGNNNIDSGSSGSEESGKHRSHSEKRKHKKSRKHKRRYDDSSDESNSESDDKESKRRRKEEKRLRKEERRRRREERHRRKADRQASKLKLKHAETVDMASDLEKDRESDSDADARKKGSYNGRDESDQQKLEIELREKALESLRAKKAINH

SEQ ID NO: 321 - DNA, 2733 bp, Oryza sativa
  misc_feature (1743)..(1743): r = adenine or guanine
  misc_feature (1860)..(1860): y = cytosine or thymine
atggcatgcaatgaatcgatcgagagccgcatcatcctcaccgaccaatccaatttaaggttggttagcctagctttggatgagcagaagggcagcgtgatcctgtgcacaaccaagaaccaaccccaacacatggaagctgcggcaggggcaggaggagccattggaggtagtggtcgcgaggcggcggcggaggaggaggacggcggcgagcagtggctagaggaggaggcggaggcggaggcggtgtactgcgccgtggggaaggaggcggtgaaggaatggaaggcgaacctcatgtgggtgctcgccgccttcccctggaggaggaggaggagccgcatcgtcctcatccacgtccaccgcccgccttcccgggtcaatatgatgggggcatgggtcccagtaagtcagcttgcagaggaggaggtgaatgcatacaggcagctggaggaggagaggatcagcaaagtcttagatgatctcttggacatttgcaaaagtcaaaaggtcaatgcgagcaagatcatcttctcctgcgacgacatcgcgagaggcctcctccagctcgtcgatgatcatgggatcactgatcttgtcatgggagcagcatctgacaaggcctattcaaggaaaatgcgggcgccgagatctaagaaagctcggaaggtgcaactgaaggcgagcccctcttgcaagatctggtttgtctgcaaaggaaaccttatctgcactagggaggtgaacgaaggactcaatagaacaggatcatcgacaactagcacaactccgaggtcgagcacttctgattactcgaggtcgagatcctcgccacgagtgcacagcctaagcagcgagcaattcggtatgcaggatccagccgaaccgacgacatcatcagttgatcagactcctatcagggaggacaatgccatggaccgtggcactgagggttttaatcatgaagcagttgctgttgctagttcatcaacagtcccagtgtctgaaaatgtagaggctgtacagagatcagctgctgctgttgtgcagtctctgcaagaaattgaagaggactcaccaactccttcagggcatggttcggaggatgctggtgatgtgagcgatgcgtacgacaagttcaaggatgctgtgatagaagccgagaacctcaggcatgaggcatacgaggagactcgccggcgtcaaaaggtcgagcgcgacctcgccgacgcgacaagaattgcgaacgaagcggagagctcgcagcagagggaggcgaggcatcggaaggaggtggaggagaggctggcgagggagcgcgcggccatggagcaggacaggcgagagctcgacgacatactcgagcagacacgcgaggtggacgcccgcgccgccgagctcgagctccagatcacgagctccgagcggatgatgagagacctcgaggccaagctgtcggaatcgtacgacctcctccaccagctccggcgagagcgccggcgcgacgatgtgccggcggaagcaatggcgggaagcgaggctggtgaccagagactgaccttcttgcggctcggcttgccggagctggaggaggcgaccaaccatttcgacgaatctgtcaggatcggaggcggcgacggcagccgtggcagcgtgtacaggggcgacctgcgcagcatggcggtcgccgtcaagatgatcggccgtgacgtcgccgtcgacgaggtcggtttctgccgcgargtggaagccgtcggcagggcgaggcacccgaacctcgtcacgctcgtgggcgcgtgcccggaggcccgcgccgtggtgcacgagttcgtgccgggcgggagcttggaggaccgcctygccggcgccgcgccggcgctgccgtggcacgagctgtgcggcgtggcgcaccgggcatgctccgcgctggcgttcctccactcgacgcagccacgggcgacggtgcacggcgacgtccggccggcgaacatcctcctgggcgaggagtgctgctcgagcaagcttgccggcctcggcatgtgcaggctggtgcggagctccggcggcgtggcgctgtcaaggccggcggtgggctacgtggacccgcggcacctggcgacgggggagatgaccccggaacgcgacgtgtacgcgctgggcgtggtcctcctccggctcgtcaccgggaagccgccgttgatggcgaagcaggaggcgcgggaggccgcgggcggcagcaaggcgtggcacgaggtgttcgacgcgagctctggaggctggccgttggaggtcgccagggaggtggcgctcgtcgggctgaaatgctgcgacgtggaggaggagccagcgggagctcgccgtcccggcgaacttctggaggaggcatgcggcgtgctggaggcggcgatgagcgcggcgccggggaggtcgtggtcgtcggtgtcgtcgtcgtcggacggcggtgagggcggggcgccgtcctacttcgtgtgcccgatcttgaaggaggtgatgcgggacccgcagatcgccggagacgggttctcgtacgaggcggaggcgatcagggagtggctgcgcagcgggcgcgacacgtcgccgatgacgaacctgaagctgccccgccgcgagctcgtccccaaccatcccctccgcgacgccatccaccactggcgcctccgccgcgccatgcgaaccaactttactactggattagatagctactactactag

SEQ ID NO: 322 - protein, 910 aa, Oryza sativa
MACNESIESRIILTDQSNLRLVSLALDEQKGSVILCTTKNQPQHMEAAAGAGGAIGGSGREAAAEEEDGGEQWLEEEAEAEAVYCAVGKEAVKEWKANLMWVLAAFPWRRRRSRIVLIHVHRPPSRVNMMGAWVPVSQLAEEEVNAYRQLEEERISKVLDDLLDICKSQKVNASKIIFSCDDIARGLLQLVDDHGITDLVMGAASDKAYSRKMRAPRSKKARKVQLKASPSCKIWFVCKGNLICTREVNEGLNRTGSSTTSTTPRSSTSDYSRSRSSPRVHSLSSEQFGMQDPAEPTTSSVDQTPIREDNAMDRGTEGFNHEAVAVASSSTVPVSENVEAVQRSAAAVVQSLQEIEEDSPTPSGHGSEDAGDVSDAYDKFKDAVIEAENLRHEAYEETRRRQKVERDLADATRIANEAESSQQREARHRKEVEERLARERAAMEQDRRELDDILEQTREVDARAAELELQITSSERMMRDLEAKLSESYDLLHQLRRERRRDDVPAEAMAGSEAGDQRLTFLRLGLPELEEATNHFDESVRIGGGDGSRGSVYRGDLRSMAVAVKMIGRDVAVDEVGFCREVEAVGRARHPNLVTLVGACPEARAVVHEFVPGGSLEDRLAGAAPALPWHELCGVAHRACSALAFLHSTQPRATVHGDVRPANILLGEECCSSKLAGLGMCRLVRSSGGVALSRPAVGYVDPRHLATGEMTPERDVYALGVVLLRLVTGKPPLMAKQEAREAAGGSKAWHEVFDASSGGWPLEVAREVALVGLKCCDVEEEPAGARRPGELLEEACGVLEAAMSAAPGRSWSSVSSSSDGGEGGAPSYFVCPILKEVMRDPQIAGDGFSYEAEAIREWLRSGRDTSPMTNLKLPRRELVPNHPLRDAIHHWRLRRAMRTNFTTGLDSYYY

SEQ ID NO: 323 - DNA, 555 bp, Oryza sativa
  misc_feature (56)..(56): m = adenine or cytosine
  misc_feature (429)..(429): y = cytosine or thymine
atggccccgaaccatagagagcaggtcctacctggaaaacttgaaaattgggaacmcatgtctattcacgcgttagcaacgggaaatgtttccattggggctgttgtctggccaaaactcagatcgagacacagtttacagcttccattggggcgtttgtttgaccacgacggcaatgcgacggacacggcaagcacatctgacaattctggccgtcaagactcgaagagtatcactttagacatgagacttcttctgttctttagggacgaaaaatttaaaaaagaagaggaggaggaggagagaaactgcaccaacttccagaggaacgcgaacatcgccggcggcggcggcggcggctgcagcagcaccaccactcgctcagctccacccggctcggtcgcccttctcatgcctcgcgtgacaggyggactggccgagcatattcgcgcgaatataatagacggatttgggaagagacctgctgctcagccgattgcagcactgaccgcttgcttcactgcacaagttacgtttaaattactcctcggttaa

SEQ ID NO: 324 - protein, 184 aa, Oryza sativa
MAPNHREQVLPGKLENWEPMSIHALATGNVSIGAVVWPKLRSRHSLQLPLGRLFDHDGNATDTASTSDNSGRQDSKSITLDMRLLLFFRDEKFKKEEEEEERNCTNFQRNANIAGGGGGGCSSTTTRSAPPGSVALLMPRVTGGLAEHIRANIIDGFGKRPAAQPIAALTACFTAQVTFKLLLG

SEQ ID NO: 325 - DNA, 636 bp, Oryza sativa
  misc_feature (425)..(425): m = adenine or cytosine
atgaacgagctgaccacccagggcgaaccgacgttctccctttccccgcgcaacctggccgaggccatggatttcgccaagatcatcgcctcttcggacatggtgccgaaggactacgtcggcaagcccggcaatgtgctggtggctgtgcagaccggcgccgaactgggcctcaagccgatgcagtcgctgcagggcatctccgtcatcaacggccgcccgagcatctggggcgacgccatgcgcgcgctggtgatcagccaccccgagttcgaggacctgcacgaggataagcaggatacctactgcaccgtgacgctcaagcgccgcggccgctcggcttttgatcagcacggcatccggtcgatcgaggaggtgcgcgactacccggacgagcagcgcgtcgagcgcgacatcacgccggmaccggctgcagccgccgtcgcggcgccggcccgcgcggagctgccggagtgcacgcccgagaagttcgccgagaacacgcccgcttggcgcgacctgatcctgtcgggcaagaagacgcccgccgcgctgatctcgatgctgagcacgaagaccatcctgaccgaagaccaaaaactcacgatcgattcgtggggccacgaaggcgaataa

SEQ ID NO: 326 - protein, 211 aa, Oryza sativa
MNELTTQGEPTFSLSPRNLAEAMDFAKIIASSDMVPKDYVGKPGNVLVAVQTGAELGLKPMQSLQGISVINGRPSIWGDAMRALVISHPEFEDLHEDKQDTYCTVTLKRRGRSAFDQHGIRSIEEVRDYPDEQRVERDITPGPAAAAVAAPARAELPECTPEKFAENTPAWRDLILSGKKTPAALISMLSTKTILTEDQKLTIDSWGHEGE

SEQ ID NO: 327 - DNA, 2650 bp, Oryza sativa
atgtcgggccaagcgggggatgggaatgatggtgataagggagctaagatcccttatgactatccccctacatctacatcttatgtaagtacctatagcggcaaagctccgtacttcaatggtacggactatgccgcttggaagcataagatgaagatgcatttgaagtctattaacccatctatttggagaatagtcaaaaaaggctatgttttgcagaatcctgaggatcccaccaaggaggacgacgagaacgagcacaagaatgctcaagccgctaatgcaatacttagcgccttgagtggaagtgagttcaaccgtgtggatggcattgagagtgccaaagtgatttgggacacgcttcggaacttgcatgaaggcacggatagtgttcgtgagtccaaggtggagatcctcaaggggcaatttgagagatttgtgatgttggatggtgagagcccaagcgacatgtacgaccggttgagcaagattgtcaatgagatcaagggacttgactccaaggacatgactgatgaggttatgatcaagaagatggttcgagcaatcactccaaggaactctatcttggtgaccatcattcgtgagcgtccggactacaagactctcacacctcatgatttgctcggacgcatccttgcccatgacatgctcgtgcaagagtccaaggatgtcatccaatacatcaaccaaagctcaaccgcaagcatcaagaaggaagacttggctttgaaggcaaaggaagaagaataagaagagaaccgcaagagcaagagcaaggcggagatcgatgatgaagagatggctctcttcgtcaagaagttcggcaagttcatgaggcgaaacggcttcttcaagggaggatcttccaagcactactccaacaagtcaagtggaagacactccgcaagagtgtgctacgtgtgcaaagagcccgggcacttcattgcggattgcccccacctcaaggatggttcccatatcaaggaagataagaagaagagtgagaagaaggatgagaagaaggagaagcacatgcatagcaagagggaacactatggccaagctcaccttgggatgatcttcggctacgactccgagtcaaactcaagtgatgaagaaggagtcgccacgttcgccatcaagccttcatcaccaccgagactcttcgactactcaagtgatgaggatgctcccgtttgcctcatggcaaaggagcctatggtaccttctcctctcaagtcatttaatgtcgatcttgttagtgatcactcaagtgatgagttggacaaagcatacctcactcttgaagagaagttcgaaatcttaaagaatagtgtctctctccctagcgagccatcttgttccaaaattgtcccaagcaatgaaccatgtgtgagatgcaaagatattgatattgaagcttgtgctactaactctatttctttgaagtgctttgcaaaagaatatgtctccggtggaagaagttgggtgattgatagtggatgcaccaatcacatgaccggagaagaatcaatgttttcaactcttggatccccaaatggcacttcacaacataacatagtcttcggagatgatggaaagggaaaggttatgggattgggtaagattgcaatctctaatgatctttccattgccaacgttctctaggtctttaagggtgttctcaagggaaagctttaccttctggatttttcctcaagtaaagccaaacatgagacatgcttagtggctaagtccaacacggggtggctttggcatcggaggctagcccatgttggtatgaggaatcttcacaagcttctaaagcacgatcacatccttggactaacaaatgttcaatttgagaaagatagggtgtgtagcgcatgtcaagccggcaaacaaattggagcacatcaccccgtcaagaatgtgatgaccactacaagaccgttggagcttctccacatggacctcttcggaccaattgcttatctaagcattggaggtaacaaatatggtcttgttattgttgatgacttttcacgcttcacgtgggtgttctttttgcatgacaagagtgagacacaagctatcttcaagaagtttgcaagaagagcacaaaacgagttcgacctcaagatcaagaacattcgaagtgacaatggcaaggagttcaagaacacgtacatcgagagtttccttgatgaagaaggcatcaagcacgagttctcggctccatattcacctcaacaaaatggagtagccgagaggaagaataggactctcattgagatggcgaggaccatgttggatgagtacaagacatcggaccgtttttgggccgaagccgtcaacacagcatgccacgccatcaaccgcctttatcttcaccgccttcttaagaagactccctatgagcttccttaccgaggtgaagaggaggatccgagcgaagcaatcaaaagattggctcttggggacgtacgtcatagggagccacaacaaggagcctcttcctcaacacaagtggagccacctgcatcaacccaagccgacgatccctctacctcaagcttggatcaaggtgaagaaggcgagcaagtgccaccctcaccgatcaacttag

SEQ ID NO: 328 - protein, 883 aa, Oryza sativa
  X_region (257)..(257): Xaa = any naturally occuring amino acid
  X_region (504)..(504): Xaa = any naturally occuring amino acid
  X_region (513)..(513): Xaa = any naturally occuring amino acid
  X_region (534)..(534): Xaa = any naturally occuring amino acid
  X_region (589)..(589): Xaa = any naturally occuring amino acid
  X_region (603)..(603): Xaa = any naturally occuring amino acid
  X_region (608)..(608): Xaa = any naturally occuring amino acid
MSGQAGDGNDGDKGAKIPYDYPPTSTSYVSTYSGKAPYFNGTDYAAWKHKMKMHLKSINPSIWRIVKKGYVLQNPEDPTKEDDENEHKNAQAANAILSALSGSEFNRVDGIESAKVIWDTLRNLHEGTDSVRESKVEILKGQFERFVMLDGESPSDMYDRLSKIVNEIKGLDSKDMTDEVMIKKMVRAITPRNSILVTIIRERPDYKTLTPHDLLGRILAHDMLVQESKDVIQYINQSSTASIKKEDLALKAKEEEXEENRKSKSKAEIDDEEMALFVKKFGKFMRRNGFFKGGSSKHYSNKSSGRHSARVCYVCKEPGHFIADCPHLKDGSHIKEDKKKSEKKDEKKEKHMHSKREHYGQAHLGMIFGYDSESNSSDEEGVATFAIKPSSPPRLFDYSSDEDAPVCLMAKEPMVPSPLKSFNVDLVSDHSSDELDKAYLTLEEKFEILKNSVSLPSEPSCSKIVPSNEPCVRCKDIDIEACATNSISLSALQKNMSPVEEVGXLIVDAPITXPEKNQCFQLLDPQMALHNITXSSEMMERERLWDWVRLQSLMIFPLPTFSRSLRVFSRESFTFWIFPQVKPNMRHAXWLSPTRGGFGIGGXPMLVXGIFTSLLKHDHILGLTNVQFEKDRVCSACQAGKQIGAHHPVKNVMTTTRPLELLHMDLFGPIAYLSIGGNKYGLVIVDDFSRFTWVFFLHDKSETQAIFKKFARRAQNEFDLKIKNIRSDNGKEFKNTYIESFLDEEGIKHEFSAPYSPQQNGVAERKNRTLIEMARTMLDEYKTSDRFWAEAVNTACHAINRLYLHRLLKKTPYELPYRGEEEDPSEAIKRLALGDVRHREPQQGASSSTQVEPPASTQADDPSTSSLDQGEEGEQVPPSPINL

SEQ ID NO: 329 - DNA, 1032 bp, Oryza sativa
atggccgccgccgccacgggccctgtccccttcaaggacgccgacgacgacggcacgctcgccgccgccgaggcgcgctcgcctctcccgaaggaggagttcggcgacctcgtcgcggcgctgccgcggaaggagcagtacctcgacgggcggctctacgaggggttctggctgccggagcactacgcgccggggatcatcgcgttccgccgccgcttcacgccgcgcgccgacgacgtggtccttgccagctaccccaagtgcggcaccacgtggctcaaggcgctggccttcgccgccatgacccgcgccgcctacccggcggacgaacacccgctgctccgcctcaacccgcacgacgtcatcccgttcgtcgaggacgtcttcaccgacggccacgaggccaagctcgacatgctcccctcgccgcgcctcatcaacacgcacacgccgtaccagcttctcccggagtcggtcgtcgccggcgacggcggcggcggatgcaaggtcgtctacatctgcagggaccccaaggacatggtcgtgtcgctgtaccacttcatgcggcgcctccagcccgacctgtcgctcgccggcgtggtggagtccgtcgccgacggcacggtgccgttcgggccgatgtgggaccacatcctcggctactggcgggcgagcgtctcccgcccggaccgggtgctcttactcaggtacgaggacctgctccgcgacggcgccgccggcgagcacgtcagggcgatggcgaggttcatggggcggccgttctcggccgccgaggaggccgccggcgccgtagcgagcgtcgtggagttgtgcagcttcgagaggatgaaggcgctggaggtgaaccggcggggcacggcggggtcgtacaagagcatgccgcgcgacgccttcttcaggaagggcgtcgccggcgactgggcgaaccacatgtcgccggagacggcagcgaggctggacggcatcttccgcgaaaaattccgtggcacagggctcaccattgttccatga

SEQ ID NO: 330 - protein, 343 aa, Oryza sativa
MAAAATGPVPFKDADDDGTLAAAEARSPLPKEEFGDLVAALPRKEQYLDGRLYEGFWLPEHYAPGIIAFRRRFTPRADDVVLASYPKCGTTWLKALAFAAMTRAAYPADEHPLLRLNPHDVIPFVEDVFTDGHEAKLDMLPSPRLINTHTPYQLLPESVVAGDGGGGCKVVYICRDPKDMVVSLYHFMRRLQPDLSLAGVVESVADGTVPFGPMWDHILGYWRASVSRPDRVLLLRYEDLLRDGAAGEHVRAMARFMGRPFSAAEEAAGAVASVVELCSFERMKALEVNRRGTAGSYKSMPRDAFFRKGVAGDWANHMSPETAARLDGIFREKFRGTGLTIVP

SEQ ID NO: 331 - DNA, 600 bp, Oryza sativa
atgggcccacccgatttcatgggccttccgcttccgcaccacctgggccgcgccgccgcagctcttagcccgcgcgcacatgcggcacgaacgcctcttgccccatttccaccgccctctcccgcttccggcgatgtccacgccgaacagcctcacgacacgtgctgcttcgctgcttgtaattggcttctcgtcgccggtggccgccgccgtgttgttcttctagcagtcgatgaagagcagctcgtcggcgcagaggcccttctccctcacgaatcggctccatcccttggtcagcacgtagctctggctgctgttcctggacgagtcacagcggtggcggcagttggagggtttgtcgctgcggccgcgctcgccgagagggccggcgtgatcgcgccaaggaaacgctccaacgcgcccccagattcgcatcgcaccggtgagtttctgaggaattggagatgtgtgttgctgcttgaaatcaaaaactctgatctcttgattccctttgaagatttgagagccaatcaagtttgcattcgccacaattttcgcaccgttctccgtcactgtctcttctcactctctgtctcttga

SEQ ID NO: 332 - protein, 199 aa, Oryza sativa
MGPPDFMGLPLPHHLGRAAAALSPRAHAARTPLAPFPPPSPASGDVHAEQPHDTCCFAACNWLLVAGGRRRVVLLAVDEEQLVGAEALLPHESAPSLGQHVALAAVPGRVTAVAAVGGFVAAAALAERAGVIAPRKRSNAPPDSHRTGEFLRNWRCVLLLEIKNSDLLIPFEDLRANQVCIRHNFRTVLRHCLFSLSVS

SEQ ID NO: 333 - DNA, 1686 bp, Oryza sativa
atggcagatctgcaggagcccctcgttcgtccgaagaggaagaaggttttggtggactacttggtaaagttccgatggattctggtgatctttgtggtgctccccatttccgctctgatctacttcaatatctatttgggcgatgtctggtctgccatgaaatctgagaaacgtcgccagaaggaacatgatgacaatgtgcaaaaagttgtgaagcggctcaagcagaggaacccaaagaaggatggccttgtttgcacagctaggaagccctggattgctgttggcatgcgcaatgtagactacaagcgtgctaggcattttgaggttgacctttccgccttcaggaacattcttgagattgacagagagagaatggttgccaaggttgagcctcttgtcaacatgggccagataaccagagctacatgcccaatgaaccttgcccttgcagttgttgctgagcttgatgaccttactgttgggggactgatcaatgggtatggtattgaagggagctctcacctctatggtcttttctctgacactgttgtcgccgtggaagttgttcttgcagacggtcgagttgttagagccactaaggataatgagtactctgaccttttctatggcattccctggtcccagggaacacttgggtttcttgtttccgctgagatcaaactcattcccatcaaggaatacatgaggctcacatatactccagttaaagggtcactgaaggagatagcacaaggttattgtgattcgtttgcaccacgagatggtgatcctgcaaaggtcccagacttcgttgagggaatggtgtacacagaaaatgagggtgtcatgatgactggtgtttatgcttccaaagaagaggcaaagaagaagggcaataagatcaactgtgtcgggtggtggttcaagccttggttttaccaacatgctcagacagcactcaagaagggtgagtttgtggagtacattccaacaagagagtactaccaccgtcacacccggtgtctgtactgggaggggaagctgatcttgccattcggcgaccaattctggttcaggttcctcttgggctggctgatgccaccaaaggtgtctctgctcaaggccacacagggtgaatctatcaggaattactaccatgacaaccatgtgattcaagacatgctggttcccttgtacaaagttggagatgctcttgagtttgttcacaaggaaatggaggtttatccactgtggctgtgcccgcaccggctctacaagctccctgtgaaaaccatggtgtacccagagcctggctttgagcaccaccacaggcaaggtgacactagctatgcccagatgttcaccgatgttggtgtgtactatgctcctggtgctgtcctgaggggcgaggagttcaatggcgctctagctgtccacaggctggagcagtggctgattgagaaccacagctaccagccacagtacgctgtatctgagctcaacgagaaggacttctggaggatgtttgatgcttctcactacgagcattgccgccaaaagtatggtgccgtcggtacctttatgagcgtctactacaagtccaagaagggaaggaagactgagaaggaggtgcaggaagccgaggccgccatcctcgagccagcctacgctgatgaggcgtaa

SEQ ID NO: 334 - protein, 561 aa, Oryza sativa
MADLQEPLVRPKRKKVLVDYLVKFRWILVIFVVLPISALIYFNIYLGDVWSAMKSEKRRQKEHDDNVQKVVKRLKQRNPKKDGLVCTARKPWIAVGMRNVDYKRARHFEVDLSAFRNILEIDRERMVAKVEPLVNMGQITRATCPMNLALAVVAELDDLTVGGLINGYGIEGSSHLYGLFSDTVVAVEVVLADGRVVRATKDNEYSDLFYGIPWSQGTLGFLVSAEIKLIPIKEYMRLTYTPVKGSLKEIAQGYCDSFAPRDGDPAKVPDFVEGMVYTENEGVMMTGVYASKEEAKKKGNKINCVGWWFKPWFYQHAQTALKKGEFVEYIPTREYYHRHTRCLYWEGKLILPFGDQFWFRFLLGWLMPPKVSLLKATQGESIRNYYHDNHVIQDMLVPLYKVGDALEFVHKEMEVYPLWLCPHRLYKLPVKTMVYPEPGFEHHHRQGDTSYAQMFTDVGVYYAPGAVLRGEEFNGALAVHRLEQWLIENHSYQPQYAVSELNEKDFWRMFDASHYEHCRQKYGAVGTFMSVYYKSKKGRKTEKEVQEAEAAILEPAYADEA

SEQ ID NO: 335 - DNA, 1079 bp, Oryza sativa
atggcgaccgcgtgcccgccgctctcgctgcagccggcctacctctcggggaggacggcggaggagccgctgctggtgagcgcgatcaaggggagggtcgagagaccgccggtctggctcatgaggcaggccgggagagctatcaattgctctgcgagcgacatccttcattccgtgaaagatcagaaaatgttgaccttgttgttgagatctctctacaaccatggaaggttttcaagcccgatggagttatcctgttctcagatatccttacaccgcttcctgggatgaacataccttttgacattgtgaaaggaaaaggtccagtgatatttgatcccttgagaacagcagctgctgtgaatgaggtcagagaatttgttccagaggagtgggtcccatatgttgggcaggctttaaacattttgcgggaagaggttaacaatgaagctgccgtgttgggctttgttggagctccctttacattggcatcctattgtgttgaaggaggttcatcaaaaaacttttcaaagattaagaaaatggccttctcagaaccagagattctgcataatttgctacagaaatttactacgtccatggctaactacattaaataccaagctgacaacggagcacaagctgtccaaatttttgactcatgggctacagaactcagcccagttgattttgaggagtttagcttgccttatctgaagcagattgtggatagtgtcaaagaaacacatcctgaattgcctctgatactatatgcaagtggatctggtggactgctggagaggcttccactgacaggtgttgatgttgttagcttggactggacggttgatatggctgaggggaggaaaagattgggatctaacatagcggttcaagggaatgttgaccctggcgttctttttgggtcaaaagagttcataagcaagcggatttttgacactgtgcagaaagctggtaatagtgggcatgtattgaaccttggtcatggcattaaggtaggcactcctgaggaaaatgttgcccatttctttgaggttgcaaaagggatcagatactga

SEQ ID NO: 336 - protein, 361 aa, Oryza sativa
  X_region (46)..(48): Xaa = any naturally occuring amino acid
GDRVPAALAAAGLPLGEDGGGAAAGERDQGEVERPPVWLMRQAGRXXXSYQLLCERHPSFRERSENVDLVVEISLQPWKVFKPDGVILFSDILTPLPGMNIPFDIVKGKGPVIFDPLRTAAAVNEVREFVPEEWVPYVGQALNILREEVNNEAAVLGFVGAPFTLASYCVEGGSSKNFSKIKKMAFSEPEILHNLLQKFTTSMANYIKYQADNGAQAVQIFDSWATELSPVDFEEFSLPYLKQIVDSVKETHPELPLILYASGSGGLLERLPLTGVDVVSLDWTVDMAEGRKRLGSNIAVQGNVDPGVLFGSKEFISKRIFDTVQKAGNSGHVLNLGHGIKVGTPEENVAHFFEVAKGIRY

SEQ ID NO: 337 - DNA, 369 bp, Oryza sativa
atgccccgcgggcggcggatgcttttcccggggtgtccagcatcatcgttactgcacttctcttctttccctttcctatccccactcaatcgcctctccaaatccctcgcatgcaacaccacacgtctgacggcggtgaaggacatgagatcggtgggttttgcaggtggcaaccaaggcgattggagcagcacatacgggaggggcggatccgccggcgaccattgcgggagggctagatccactgccaatggccaagggaagggcagatccgccggcgacgacctcgggacaagtggatctagtgtcgttgcctgccgcgccatggcctccaccaggccgcagcctccccctccactgaccatgtag

SEQ ID NO: 338 - protein, 122 aa, Oryza sativa
MPRGRRMLFPGCPASSLLHFSSFPFLSPLNRLSKSLACNTTRLTAVKDMRSVGFAGGNQGDWSSTYGRGGSAGDHCGRARSTANGQGKGRSAGDDLGTSGSSVVACRAMASTRPQPPPPLTM

SEQ ID NO: 339 - DNA, 855 bp, Oryza sativa
atggaggagagtttgatgggatggtggcaagcgaatgcgaccgtatttgaaggagttggcaagtcggcggtagggctccaacgacagaaacaaatcgaaagctcttgtaacaaggaagcgatggatcgaagttggatgtacacgactggcttgaggcgtcagtacaaggagtatagagatggcgtattaagttttatgaaagccgcagtggaggagaggataagaagaaacgacaagtacatgtgttgtccatgtagtgattgcaggaatgagatttggttggacgatgaaaaggaagtacacgctcacttgatacgccggggattcatgaagagatacacatgctgggtgaagcatggagagcaagatctgggtactgatggtgcagctgcggacggaagtggtgcagacaatcatgaagaaggagatgaagaagagcatgacatgtttgtcccatctccattgggcggtgaaatggttgatgtggaccctgatatgctgcaagacatgttacgtgacgttgatgacctagctatgaacgagagagattcaatgaagttcagcaggttggtcagtgactcggagactcctctatacgcaggatgcaagccaaagcacaccaaattatcagcagcattagacctaatgaagttgaaggctagtagtggatggccagacaagagttttacagaacttttgggaatactgaaggacatgcttcctcaggagaacacattgcccaagatgacatatgaagcaaaacaggttctgtgtcccctagggttagaggttcggagaattcacgcgtgtccaaacgattgcatattgtacccacaagcaataccgcggacttag

SEQ ID NO: 340 - protein, 284 aa, Oryza sativa
MEESLMGWWQANATVFEGVGKSAVGLQRQKQIESSCNKEAMDRSWMYTTGLRRQYKEYRDGVLSFMKAAVEERIRRNDKYMCCPCSDCRNEIWLDDEKEVHAHLIRRGFMKRYTCWVKHGEQDLGTDGAAADGSGADNHEEGDEEEHDMFVPSPLGGEMVDVDPDMLQDMLRDVDDLAMNERDSMKFSRLVSDSETPLYAGCKPKHTKLSAALDLMKLKASSGWPDKSFTELLGILKDMLPQENTLPKMTYEAKQVLCPLGLEVRRIHACPNDCILYPQAIPRT

SEQ ID NO: 341 - DNA, 1098 bp, Oryza sativa
atggtggatttggtgaacggcgtgctcaactgggtggcgacgccggccatggtggccagcctgctgctcttctacccgccctactacctcttcaagaccgtccactccttcctctcctacctcttccccgacgacctcgcccgcaaggtcgtcctcatcaccggcgcctcctccggcatcggcgagcaattagcatacaactatgctctgaaccgggcatcattggtccttgttgcaagaagagaatggagcctgcgtaaagttgccgatcaagcgttcgagcttggagcacctgatgtgatcattcttccgggcgacgttgcgaatcctgaagactgcaaaagatttgttcagaccgcaatcgatcactacgggcgatgcaagtctccaatatcactgatttgttcagtaaatttcttcagcaaaatggaccatcttgtgtgcaacgctggcatcgcaagtgttggcgcgtttcaggagattccagatgttactaactacagctctcaatttgatgtgaacttctggggttcagttcagtcaacttttgaagctctccctcatctgaaaaggagccgaggaagaatcgttgttactgcgtcggcaaccggatggaatcctgttccaagaatgaccttctacaatgctgccaatgctgcactgataaacttctacgagacgctgcggacagagcttggtagccaagttggaatcacaattgtaacacctgggtggatcgagtctgagatgtcaaaagggaaatttctcaaggatcatggtgaaatggaggtcgatcaagaaatgcgagatgctcaaattggtttatttcccgtggagtacgcgaagaattgcgcaaaagccatggtacaagcggttcggcaagggaagcgttgtctcaccgtgccaccatggttcagcacaatgtacctgtggagggtattcgcaccggaggtcgtcgagttctgctaccgcctcctgtacatgcaccgccatggtggtagccaagctgatgcgccgagcaagaagatggctgaggctggtggaaagaagctcttgtatccaacgtcgctgcgctctgatgacatcaaggatgagtga

SEQ ID NO: 342 - protein, 365 aa, Oryza sativa
MVDLVNGVLNWVATPAMVASLLLFYPPYYLFKTVHSFLSYLFPDDLARKVVLITGASSGIGEQLAYNYALNRASLVLVARREWSLRKVADQAFELGAPDVIILPGDVANPEDCKRFVQTAIDHYGRCKSPISLICSVNFFSKMDHLVCNAGIASVGAFQEIPDVTNYSSQFDVNFWGSVQSTFEALPHLKRSRGRIVVTASATGWNPVPRMTFYNAANAALINFYETLRTELGSQVGITIVTPGWIESEMSKGKFLKDHGEMEVDQEMRDAQIGLFPVEYAKNCAKAMVQAVRQGKRCLTVPPWFSTMYLWRVFAPEVVEFCYRLLYMHRHGGSQADAPSKKMAEAGGKKLLYPTSLRSDDIKDE

SEQ ID NO: 343 - DNA, 1044 bp, Oryza sativa
  misc_feature (837)..(837): m = adenine or cytosine
  misc_feature (901)..(901): m = adenine or cytosine
atggaggggagctggcggcggagaagcacgtccgctacatcgtcaccgtggagaagaaggactcgttcgagtcgctggtgatggagcacatccggctcaacggcgcgtactggggcctcaccacgctcgacctcctccacaagctccgcgccgtggaagccgacgagtcggggggaaacgttgggcatgacgcgcatgtcctctacacgctcagcgccgtgcaggtcctgtgcctctttgatcggcttgacgctctcgatgtcgataagattgctgggcttcaaaatgaagatggatcattttctggtgatatttggggtgaagtggacactagagattctcatacattgcaatatgcaccctctctttgctgcatcggctggaaaaaattaatgtgcaaaaagctgttgattatattgtaagctgtaagaacttggatggtggatttggagctatgccaggaggtgaatcacacgctgggcagattttgttgtgttggcgctctcgcaatcactggctcgttgcatcacattgatagagatctccttggatggtggctttgtgagcgtcagtgcaaagagggagggctcaatggacggcctgagaaacttgctgatgtgtgctactcctggtgggtgctctcaagcttgataatgattgatagagtgcactggattgacaaggacaaacttgcaaaattcatactaaattgccagaatggtggaatttcagatagaccagataatgcggtagatatctaccacacatactttggagttgcaggcagggctttcactgatggagtaccctggagtgaaacccatggaccctgcctamgcgctgccgctggatgttgtcaaccggattttcttgagaaagaacattagcatctgcacgatcmacagatcatgctgtgtaacatggacaggaacacgtggtttacttgaaaatctgaaaatcatccccatggaagaacgaatgcagcatcaaattcaagtggtaactagaatatgttgtcaggatatcgcgaccaagctttcttga

SEQ ID NO: 344 - protein, 353 aa, Oryza sativa
  X_region (90)..(93): Xaa = any naturally occuring amino acid
  X_region (115)..(115): Xaa = any naturally occuring amino acid
  X_region (244)..(246): Xaa = any naturally occuring amino acid
  X_region (285)..(285): Xaa = any naturally occuring amino acid
  X_region (307)..(307): Xaa = any naturally occuring amino acid
GGELAAEKHVRYIVTVEKKDSFESLVMEHIRLNGAYWGLTTLDLLHKLRAVEADESGGNVGHDAHVLYTLSAVQVLCLFDRLDALDVDKXXXXIAGLQNEDGSFSGDIWGEVDTXRFSYIAICTLSLLHRLEKINVQKAVDYIVSCKNLDGGFGAMPGGESHAGQICCVGALAITGSLHHIDRDLLGWWLCERQCKEGGLNGRPEKLADVCYSWWVLSSLIMIDRVHWIDKDKLAKFILNCQNXXXGGISDRPDNAVDIYHTYFGVAAGLSLMEYPGVKPMDPAXALPLDVVNRIFLRKNISICTIXRSCCVTWTGTRGLLENLKIIPMEERMQHQIQVVTRICCQDIATKLS

SEQ ID NO: 345 - DNA, 4320 bp, Oryza sativa
  misc_feature (1155)..(1155): k = guanine or thymine
  misc_feature (1160)..(1160): y = cytosine or thymine
  misc_feature (4287)..(4287): r = adenine or guanine
  misc_feature (4294)..(4294): s = guanine or cytosine
atgtcacagtttcgcccttcacaacatggtagtgatagtgatgcccagatgtggcaacgacagatgttgtataagcagctacaagagttccagaggcagcaacagcagcagcagcttgatcatggaggtagaatgcagaactcttttgggcagttccaagcccctgcaaaacaatccctagctgatcagtttccaaccatgatgaatgaaatgcctatgaatgagccatcaagttatgcatggtcaaatggtatttctcttggtggctccaggttaggaagcaactctcagattttaaataatggtaacccacattgggagcaacatcatggtgcttctcttggcacaagcagctttgcaaatggtgcagtgtactcaaacatccagaatctcatgaggccaatgggatcagttaataataaagtaaaccaatcttctcattcccttcctgctagcatgagcaaaggttctgggaatcagtactcccagttcccaggatttcctgctaattcccacaatgcaatggcaagagctggttcagaccagtcagatatgacagcaaggtttgcaagctcaattaattcgttccagaatgaacatggtctttgtgaacaagttacatccaataatttgcagaatttttgtgaaaatggaagtgtattaagtgattcttcgactcaaagtcaaggcggtaacttgaagacaggcagtcctgttctagttaatcacttacaacatggttttcatgttcaacattttaatggctggatgaaccaagttgaatgtcagtcagcgccgcacgtcggaccagctagcagtgctgctagccttgatcccacagaggagaaaattttgtatggagatgataacaattttactggtttattgggagaggatgattcatcagatggagttcctggtcatgataactcttcaggcaatggcaactcaagcatccctgtgtcagctcaagggggtagctggagtgctcttatgcaggaagcattacagtcgacaagcagtaaaaatggcctccaggaagagtggagtagcgtgaatttccagaatagagaccaggcatttacaaataaaatgacttctcctgatctggaacagaggcagcatgcaactttaaatagcatgaacctacatagkgcacytccaagtgcacaaccttctccctcacatgatggttcttcaggaaccatgaataatctgaagttcaccagttttcagcgtgcaacgaaatccgtgtatgaccatcaggaaaaattttcttatggatctacctccgccgctatcaataatcacacaactacaggagctaatgatgggctttttcaaccgagtttaaagcaaagccattctggtgactgtggatcaccagaacatgtcaacttatcaattggtgtttgggcacaacagaaacctatgctgctgaaacgaaatttgaactcaggtggtgaacgttttatgccacagaacgcacaaggacttggggtattgcaacaaagcagttataaccataattttaacggggagtctagtaataaccaaagcaactggaatggccgaaattccaattgcgtcaatacatattcaattaataattttcagcagtcaaaccctgatgtgaacactgttcgagtgccaaatgatggttatagcagtaaaaatactgtcctgacgagttcaagcacaggaatgtttagcccaggccaacatcaaatgatgcttggtcagagcgggggaaattttggaagcaacaatgctccagggcaaaggccacttccagagacttcatgttcacaaggaaataatgcagagtatggacttgctggcttcagccagatgtatactaatgcaatttctgctgaaggacataattcaaataatggtcagcatttaggcatctctttttctgcaagaggtaattcctttagtggaatggatgcccataatttgggccaatctgaccagaaaacgatgggtccatctgcactgctgaatcatcttagtgcaacatctggaattagtactggacattttccaacgaattctttgtgcaataataagttattgtcagagtcaattcagccaccaaataaccaagagaacctgctgggtgggagctgccaacttgctggtcatgttgggtcaacaaatgagaaaattgcaatggtagaggaacaacttactcaacattctactgccagcaaatactcgaatgaacctcccttcagaggatatgatggaacgttgttgcaaaacccaaataaaatagttcaaacaagagtcaacatatgcttcaacaatttcttcagaaggtggacagcacaaattctgttgtttctagcaatatgcccatcagatctgatattactcctaatcaacttaaccagccccctttacaaggatttggattaaaattggcaccaccaatgcaacaacaactaacttcaggtaatttatggaccagtcacacctctgttgacatcaagccagctgataattcagtaccaggggaagaccagcgacagctaccttccactcctggttcgacgacttcatctggctacccgagtcgatcctcaccattttactcatcagatgctgataatactggactgtcaagtgggtgcctcccccaaactaaaagcttaggccagcaatacccagttgcagagccaaagtctgctcctgtaaattctcttcctcagcagtctctgcaaggtactgcagcaacaatgctcaagaatgtgtggacaaacatctcagcacagcgcctggggggtatccaacataacaagataactccaaatattctccagtcaatgatgttcccaagtactattggtgattccacattacggggttgtccgaaagatgattatcaaagaatgagggtagcaaatctatctgatgatgccacaactactaccaactcaggaaggcaagaaataaagcgagttgtggaaaatgatggatctgacataccaaatatggatcaaatgggagatattttattaggaaagaaaaatgcccttcagagacccttgatgcagcatggcatcataaactcgtcacaaggggaaaatatggcagcaaacattccaaatatgggttcttcctttaacaaagtttccacctatggtggcatcagtctgcatggaagcctggcaccatccaattcccagcagataaattattctctactgcatcagattcaggccattaagcctgttgattctgatccagaaaatacgtctggaaagaggcttaaaacaactgatatgagttgtaatgcttcacaagttgaatggcccggtgccgaaagagctccacatggagaaaataatccattgagattatgtacagataaaactgaggtcccaagaatctcaaacttgttgccatcagatcagatgttaaggtttgctcccaggaacagtgaagatgtaacctcaaccatgccatcgcaggttcagttgagggagttaacctccacctccaatgatatggccactgcaagaactgatcttcaaaatcaatgctcatctcttggcacaagctcaacagaaaatttaattgaaagtggtgacaaattaatgatcaaccctcagatatcaccctggtttcaacatggtagcaacagaaatggtcataatcttgctatgtacagtgtcaggaaaactgcatcaccgtataatcatccaaaagttccctggagcatggacactagcagtgtttctgggcatggacttgaatgctctacttctgtcagacctgaaatgccttctggtctaaaggtatcttcttcggtgcgaagaccgaagaagcggaaatttaaagctcctgtgcttgtttcttggaatcaaatcattgatggccaccaaaagttggcggacatgagcagcactctgggtatggactggcctgaagcaactaatagattaatcgaggtggaagatgaagctgacattcaagaagatgctctcatattatatttaccacgtaaaaggctaattatgacctctcggttgattcagcaacttctcccttctataccagcggctattcttagggcacaagctatatcaatgtaccaaagtgtaacatatactattgtggggatgcatgcagcatgccttcaaattcatctttggacactggcactctcataagtagtggggataacaaattgagaatgacaaaatgagagacagattcacaaaggcggttgaattttttattccaagatttaaaaagatggagaatgattttgtraggtgcstgcaactattttctcttgattcttaa

SEQ ID NO: 346 - protein, 1439 aa, Oryza sativa
  X_region (385)..(385): Xaa = any naturally occuring amino acid
  X_region (387)..(387): Xaa = any naturally occuring amino acid
  X_region (1432)..(1432): Xaa = any naturally occuring amino acid
MSQFRPSQHGSDSDAQMWQRQMLYKQLQEFQRQQQQQQLDHGGRMQNSFGQFQAPAKQSLADQFPTMMNEMPMNEPSSYAWSNGISLGGSRLGSNSQILNNGNPHWEQHHGASLGTSSFANGAVYSNIQNLMRPMGSVNNKVNQSSHSLPASMSKGSGNQYSQFPGFPANSHNAMARAGSDQSDMTARFASSINSFQNEHGLCEQVTSNNLQNFCENGSVLSDSSTQSQGGNLKTGSPVLVNHLQHGFHVQHFNGWMNQVECQSAPHVGPASSAASLDPTEEKILYGDDNNFTGLLGEDDSSDGVPGHDNSSGNGNSSIPVSAQGGSWSALMQEALQSTSSKNGLQEEWSSVNFQNRDQAFTNKMTSPDLEQRQHATLNSMNLHXAXPSAQPSPSHDGSSGTMNNLKFTSFQRATKSVYDHQEKFSYGSTSAAINNHTTTGANDGLFQPSLKQSHSGDCGSPEHVNLSIGVWAQQKPMLLKRNLNSGGERFMPQNAQGLGVLQQSSYNHNFNGESSNNQSNWNGRNSNCVNTYSINNFQQSNPDVNTVRVPNDGYSSKNTVLTSSSTGMFSPGQHQMMLGQSGGNFGSNNAPGQRPLPETSCSQGNNAEYGLAGFSQMYTNAISAEGHNSNNGQHLGISFSARGNSFSGMDAHNLGQSDQKTMGPSALLNHLSATSGISTGHFPTNSLCNNKLLSESIQPPNNQENLLGGSCQLAGHVGSTNEKIAMVEEQLTQHSTASKYSNEPPFRGYDGTLLQNPNKIVQTSQHMLQQFLQKVDSTNSVVSSNMPIRSDITPNQLNQPPLQGFGLKLAPPMQQQLTSGNLWTSHTSVDIKPADNSVPGEDQRQLPSTPGSTTSSGYPSRSSPFYSSDADNTGLSSGCLPQTKSLGQQYPVAEPKSAPVNSLPQQSLQGTAATMLKNVWTNISAQRLGGIQHNKITPNILQSMMFPSTIGDSTLRGCPKDDYQRMRVANLSDDATTTTNSGRQEIKRVVENDGSDIPNMDQMGDILLGKKNALQRPLMQHGIINSSQGENMAANIPNMGSSFNKVSTYGGISLHGSLAPSNSQQINYSLLHQIQAIKPVDSDPENTSGKRLKTTDMSCNASQVEWPGAERAPHGENNPLRLCTDKTEVPRISNLLPSDQMLRFAPRNSEDVTSTMPSQVQLRELTSTSNDMATARTDLQNQCSSLGTSSTENLIESGDKLMINPQISPWFQHGSNRNGHNLAMYSVRKTASPYNHPKVPWSMDTSSVSGHGLECSTSVRPEMPSGLKVSSSVRRPKKRKFKAPVLVSWNQIIDGHQKLADMSSTLGMDWPEATNRLIEVEDEADIQEDALILYLPRKRLIMTSRLIQQLLPSIPAAILRAQAISMYQSVTYTIVGMHASMPSNSSLDTGTLISSGDNQIENDKMRDRFTKAVEFFIPRFKKMENDFVRCXQLFSLDS

SEQ ID NO: 347 - DNA, 1041 bp, Oryza sativa
atggccagcagctggaataatccggccatcttcctcgccgccgcgctggcggtggcgacggcggcgcaggtcgtcacggccggtttcaccacagacttgtactggcagcaacagccggcgcctggtgccgtcaccccctacaagacatcggactggcacgacggctccgccaccttctacggcgacccctccggcatgggcgacgacttcgggtggcgcgtgcgggtacgtgtcgaacgacatcgtgtcgctctactcgacgaagacggcggcgctgagcacgccgctgttcgccgacggcaacgggtgcgggcagtgctacgagctgcggtgcgtcaagtcgccgtggtgcaacccggggtcgccgtcggtggtcatcacggggaccaacctgtgcccgcccaactggtacctccccaacgacgacggcggctggtgcaacccgccgcggcaccacttcgacatggcgccgccctccttcctcaagctcgcgcagagggtcgccgggatcgtgccggtgcagtaccgccgcgtgccgtgccagaggaccggcggcgtcaggttctgcctccaggggaaccactactggttgctgctctacgtcatgaacgtcggcggcgccggcgacgtctcctccctctccgtcaagacctccggtggcggcggcgcctggatccaggcggcgcacaactggggcatcacgtaccaggtgttcgccgcgctggacaactccgacggcctcaccgtcaagctcaccacctacagcacgccgcagcagaccatcatcgtctccgacgccatctccccctggtggatcaccggactctgctaccagggatccaacaacttctactaatcatcaatcgatcgatcatcagatcgagttcaaagttgcagtggttcatctcttcattttgtttcttcttcttggcttgctctgctatgcgatgcgatgctagctattgtcaaagttcatggactctctgtttctttcttttgttcatagaacgggatgcatttctagttcaatgtttatgctaa

SEQ ID NO: 348 - protein, 285 aa, Oryza sativa
  X_region (153)..(153): Xaa = any naturally occuring amino acid
  X_region (203)..(203): Xaa = any naturally occuring amino acid
WPAAGIIRPSSSPPRWRWRRRRRSSRPVSPQTCTGSNSRRLVPSPPTRHRTGTTAPPPSTATPPAWATTSGGACGYVSNDIVSLYSTKTAALSTRCSPTATGAGSATSCGASSRRGATRGRRRWSSRGPTCARPTGTSPTTTAAGATRRGTTXSTWRRPPSSSSRRGSPGSCRCSTAACRARGPAASGSASRGTTTGCCSTSXTSAAPATSPPSPSRPPVAAAPGSRRRTTGASRTRCSPRWTTPTASPSSSPPTARRSRPSSSPTPSPPGGSPDSATRDPTTST

SEQ ID NO: 349 - DNA, 1437 bp, Oryza sativa
atggctgagttgcggacgtcgtggaagtcgatgctctgctgcgtcggcggcggcggggtggccggcgttgaggacgacgtgccgccggagaggaggagggtcagagggggtggtcaccaccagcggctgctgtcgtcgtcgtcgtcggcgtcgtcggcgtcgagggtgtcgctgtcgagcctgagctcgacggggaccctcacgccggaggacctgtcgctgacgctgtcgggctcgaacctgtacgccttcacctacgccgagatgagggccgtcaccggcggcttctcccgcgccaactacctcggctccggcgggttcggccccgtgtacaagggccgcgccgacgacggcctccgccccggcctcgccgcgcaggccgtcgccgtcaagtacctcgacctcgactgcggcacgcagggccacagggagtggctggctgaggtgttcttccttggtcagttgaggcacaagaatctcgtcaagctgatcggctactgctacgaggacgaacaccggatgctggtgtacgagtacatgagcaacgggagcttggagaagcatctcttcaaaagtctcgatggcgccatgccatggatgaggaggatgcagaccgccgtcggcgcggcgaaggggctcgccttcctccacgacgccgacacgccggtcatctaccgtgacttcaaggcatccaacatcctcctcgactcggacttcaacaccaagctttccgactttgggcttgccaaggatgggccgcagggcgacgcgacccatgtcacgacgcgtgtcatggggacaaacgggtatgcagcgcccgagtacatcatgacagggcacctgaccgacaagagcgatgtgtatagttttggtgtggtactactggagctattatcgggtcggcactcggtggaccgctctcgtcgccatagggagcaaagtctggtggattggacaagaaagtacctcaagaagcccgaccagttgcaccgggtcgtcatggacccagccatggagggccaatactcctacaaaggggcccaagaggctgctttggtagcctacaagtgcttgagcccatcaccaaagtccaggcccagcatgagggaggtggtcaaggccctagagcccatattggacatgaatgactacctccaaattggtacatttgtgttcaccgtcgttgtggaagataacaagaaggacgatgtgaccaaaaccaagcaagtagatggtgagaacaaggttgacatgaggatcgaggcgacagtggaagagaagcaccagagtcaccatgatcgataccggcagaagaacccaaactctgcaatccatgctgacatcgtgctgcaacgcgacggctccatcggatcgtacaccacctcgctcaggcggcacagaaggacaccgagctatctcaaggagaggggtgcctag

SEQ ID NO: 350 - protein, 478 aa, Oryza sativa
MAELRTSWKSMLCCVGGGGVAGVEDDVPPERRRVRGGGHHQRLLSSSSSASSASRVSLSSLSSTGTLTPEDLSLTLSGSNLYAFTYAEMRAVTGGFSRANYLGSGGFGPVYKGRADDGLRPGLAAQAVAVKYLDLDCGTQGHREWLAEVFFLGQLRHKNLVKLIGYCYEDEHRMLVYEYMSNGSLEKHLFKSLDGAMPWMRRMQTAVGAAKGLAFLHDADTPVIYRDFKASNILLDSDFNTKLSDFGLAKDGPQGDATHVTTRVMGTNGYAAPEYIMTGHLTDKSDVYSFGVVLLELLSGRHSVDRSRRHREQSLVDWTRKYLKKPDQLHRVVMDPAMEGQYSYKGAQEAALVAYKCLSPSPKSRPSMREVVKALEPILDMNDYLQIGTFVFTVVVEDNKKDDVTKTKQVDGENKVDMRIEATVEEKHQSHHDRYRQKNPNSAIHADIVLQRDGSIGSYTTSLRRHRRTPSYLKERGA

SEQ ID NO: 351 - DNA, 371 bp, Oryza sativa
  misc_feature (23)..(23): r = adenine or guanine
  misc_feature (24)..(24): s = guanine or cytosine
  misc_feature (26)..(26): k = guanine or thymine
  misc_feature (33)..(33): r = adenine or guanine
  misc_feature (45)..(45): w = adenine or thymine
  misc_feature (46)..(46): y = cytosine or thymine
  misc_feature (48)..(48): s = guanine or cytosine
  misc_feature (49)..(49): k = guanine or thymine
  misc_feature (52)..(52): s = guanine or cytosine
  misc_feature (55)..(55): s = guanine or cytosine
  misc_feature (56)..(56): m = adenine or cytosine
  misc_feature (58)..(58): m = adenine or cytosine
  misc_feature (59)..(59): w = adenine or thymine
  misc_feature (67)..(67): k = guanine or thymine
  misc_feature (68)..(68): m = adenine or cytosine
  misc_feature (77)..(77): m = adenine or cytosine
  misc_feature (82)..(82): s = guanine or cytosine
  misc_feature (84)..(84): r = adenine or guanine
  misc_feature (88)..(88): m = adenine or cytosine
  misc_feature (100)..(100): r = adenine or guanine
  misc_feature (112)..(112): r = adenine or guanine
  misc_feature (114)..(114): k = guanine or thymine
  misc_feature (123)..(123): y = cytosine or thymine
  misc_feature (130)..(131): m = adenine or cytosine
  misc_feature (140)..(140): r = adenine or guanine
atgacgtcaccccggcggcggcrsckgcggcgrctcgggcacacwygskcgscgsmgmwcgccggckmacgacgcgmacgasgrcgcmaacgggtaggcrccacgcggcgargkcgacgcggygaaccammggaacggcrgaagaccaacggacggcggcggcgacgaggaggaagcggcgagattccaaaagagaaaaggaagaggagatcgagaagatcatttcccctctaaagatttcaccggagaagttggaaggagaaggcggcggcggtgcgctagggtttgcgggcggcggcggccgaaggaagaagacaagactgacagaggaattgagctctgaaaaatccgagaaaatttcagagagttga

SEQ ID NO: 352 - protein, 122 aa, Oryza sativa
  X_region (8)..(8): Xaa = any naturally occuring amino acid
  X_region (11)..(11): Xaa = any naturally occuring amino acid
  X_region (15)..(19): Xaa = any naturally occuring amino acid
  X_region (22)..(22): Xaa = any naturally occuring amino acid
  X_region (27)..(29): Xaa = any naturally occuring amino acid
  X_region (33)..(33): Xaa = any naturally occuring amino acid
  X_region (37)..(38): Xaa = any naturally occuring amino acid
  X_region (41)..(41): Xaa = any naturally occuring amino acid
  X_region (43)..(43): Xaa = any naturally occuring amino acid
DVTPAAAXAAXRAHXXXXXRRXTTRTXXXTGRXHAAXXTRXTXGTAEDQRTAAATRRKRRDSKREKEEEIEKIISPLKISPEKLEGEGGGGALGFAGGGGRRKKTRLTEELSSEKSEKISES

SEQ ID NO: 353 - DNA, 1640 bp, Oryza sativa
  misc_feature (1002)..(1002): r = adenine or guanine
  misc_feature (1010)..(1010): k = guanine or thymine
  misc_feature (1016)..(1016): w = adenine or thymine
atggacgtgcgccggggcgggggcggagggcgcatcgtcggggcggcgcggagggcgctcacctggggggcgctgcccctcccgatgcggatcaccaacggcctggccatggtctccctcgtgctctcctcctgcgacctgctccgcctctgcagcgacagggagcggcccctcggcggccgggagttcgccaccgtcgtctacctcgtcagcctcttcgcccaccctgacgcccccgccaccaccaccggcgacgacgacgacggccaggggggctcccgccgcgcgcgccccgccgccgcggagcccgcgccaatgcatgggcatggtggcgggatgatggaggccgacgacgaggagatcgtcgccgcggtggcgtccggcgcgctgccgtcgcaccgcctggagtcgcggctcggggactgccgccgcgcggcgaggctgaggcgggaggcgctgcggcgggtgacggggcggggagtggagggcctccccttcgatgggatggactaccaggccatcctggggcaatgctgcgagatgcccgtcgggtacgtgcagctccccgtgggggtcgccggcccgctgctcctggacggccgcgagtaccatgtccccatggctaccaccgagggatgcctcgtcgccagcgtcaaccgcgggtgcagggccatctccgcttccggcggcgccttcagcgttctgctccgggacgccatgtcccgcgctcctgctgtcaagctgccttccgcaatgcgggcagcggagctcaaggcgtttgctgaggcgcctgcgaattttgagttgctggctgctgtcttcaatagaggtccagcagatttggtaggcttcaagacattcgttgtgcactcgctgggaggaacctatatatgagatttagctgtatcactggagatgctatgggaatgaacatggtgtcaaaaggtgttgagaatgtctggggctatctgcagaatgtcttccctgacatggatgtcatcrgcgtatckggtttwaactcttccccttgaactttgcatgcttcatcaggtaactattgctcagacaagaagccgacagctgtaaactggatagaaggccgggggaaatctgttgtttgtgaggctattattaaaggagatgttgtgcagaaagttcttaagacgactgtagaaaaacttgttgagcttaacattatcaaaaatcttgctggatcagctgtagctggggctcttgggggttttaatgcccatgcgagtaatattgttactgcattattcattgctacaggacaggatcctgcacaaaatgttgaaagctcacaatgcatcaccatgttggaagaagtaaatgatggagatgatcttcatatctctgtcaccatgccgtccattgaggtaggtacaatcggaggtggtacatgtctggcctcacaggcggcttgtttgaacctgcttggtgtcaagggttcaaatcatggctcacctggtgcaaatgctaaacgtttggctaccatagtagctggcagcgtgctcgctggcgagctctcgctccttgccgctcttgcctctggtcaccttgtcaagagccacatgatgtacaatcgatcaagtaaggatgtcgccaaggctgcttcttga

SEQ ID NO: 354 - protein, 553 aa, Oryza sativa
  X_region (66)..(72): Xaa = any naturally occuring amino acid
  X_region (283)..(283): Xaa = any naturally occuring amino acid
  X_region (342)..(342): Xaa = any naturally occuring amino acid
  X_region (346)..(346): Xaa = any naturally occuring amino acid
  X_region (351)..(351): Xaa = any naturally occuring amino acid
MDVRRGGGGGRIVGAARRALTWGALPLPMRITNGLAMVSLVLSSCDLLRLCSDRERPLGGREFATXXXXXXXVVYLVSLFAHPDAPATTTGDDDDGQGGSRRAAPPPREPAPMHGHGGGMMEADDEEIVAAVASGALPSHRLESRLGDCRRAARLRREALRRVTGRGVEGLPFDGMDYQAILGQCCEMPVGYVQLPVGVAGPLLLDGREYHVPMATTEGCLVASVNRRVQGHLASGGAFSVLLRDAMSRAPAVKLPSAMRAAELKAFAEAPANFELLAAVFNXRSSRFGRLQDIRCALAGRNLYMRFSCITGDAMGMNMVSKGVENVWGYLQNVFPDMDVIXVSGXNSSPXTLHASSGNYCSDKKPTAVNWIEGRGKSVVCEAIIKGDVVQKVLKTTVEKLVELNIIKNLAGSAVAGALGGFNAHASNIVTALFIATGQDPAQNVESSQCITMLEEVNDGDDLHISVTMPSIEVGTIGGGTCLASQAACLNLLGVKGSNHGSPGANAKRLATIVAGSVLAGELSLLAALASGHLVKSHMMYNRSSKDVAKAAS

SEQ ID NO: 355 - DNA, 414 bp, Oryza sativa
atggtggtgacccattaccaagaaacacacaccgtcgtccagtatccttccttccttgtggacggtcgcccggtcagcgcgcacacacacgtcttacgtcttaaccccacacggtcacaaccacaacaaacacgagccagacccaacccaacacacggtatttatcacctcggtgatcccccggcatatcctcctccatctccaattctccattgtcttcttcttctccatcagatcaaatccatcggaatcgatcggtggctgggagcctccttatcccccacgcagacgcttctccaccgcacattactcgcctccgccgttttggattcttccctgattttttcccctcctctcgatcgcttggtgtttgtgcttgttgttgcgttgcgtttgcttatagtggtccagtga

SEQ ID NO: 356 - protein, 137 aa, Oryza sativa
MVVTHYQETHTVVQYPSFLVDGRPVSAHTHVLRLNPTRSQPQQTRARPNPTHGIYHLGDPPAYPPPSPILHCLLLLHQIKSIGIDRWLGASLSPTQTLLHRTLLASAVLDSSLIFSPPLDRLVFVLVVALRLLIVVQ

SEQ ID NO: 357 - DNA, 1818 bp, Oryza sativa
  misc_feature (274)..(274): r = adenine or guanine
  misc_feature (382)..(382): w = adenine or thymine
  misc_feature (955)..(955): w = adenine or thymine
  misc_feature (963)..(963): m = adenine or cytosine
  misc_feature (969)..(969): k = guanine or thymine
  misc_feature (987)..(987): k = guanine or thymine
  misc_feature (994)..(994): m = adenine or cytosine
atgtcgtcgccacctgcagctttctccaatgaaggcgatgagcagccacagcgaagggctcctacaagcttccacccctctggggcaatttcttcctcagttaccagccacctactgcgcctaaggcaattactttcttattatatactctctccgtattttaatgtaactgattatttattatatgtatacatgcatgcttacatgaaagaacgggttcaagttgtgaaagaagaagttaggaaggtagtaaagggctcgagtgaagtaccaragatattggatcttgtgatcacgctgcaacggcttggattggatagttactacgagactgagataaacgaccttctctgcattgtttacaacaccgactacaacgatwaagatttacacctagtttctcttcgattttatcttctacgaaagaacggctatgatgtgtcatctgatatgtttcaacattttaaagacaaagaggggagttttgttgctgatgatgtaagaagtcttttgagcttatataatgcggcatttctgaggactcatggtgaaaaagtacttgatgaagcaattgtttttacaactaaccgccttagatccgaattggaacatttgaaatctccggcagctgatgaagtgtctcttgctcttaatacacccctgttccggagggttagaatattagaaatacgaaactatattcctatttatgaaagtgctactacacgaaacgaatccatattagaatttgcaaagttgaatttcaatctccttcaacttatttattgtgaggagctaaaatctatcacaggatggtggaaagagcttaatgttgaatcaaacttaagcttcattcgggatagaatagtggaaatgcatttttggatgataggagcatgctcggagccccattatcctctttcacgaattatacttacaaagatgatagcatttwtcaccatmctagakgatatatttgacacatakgctacamccgaggagagcatgatgcttgccaaagcgatatatatgtgcaatgaaactgcaacagtgctacttccaaaatacatgaaggatttctacttatattatttaaagacatttgattcatttgaagaagcactatgtccaaacaaaagttatcgagtgtgttatctcaaagagttgaatatatctaactcaacgaacaatactgattgttttatcctaagaggaaattatggtaaccactttatttatgacattctaatgactcaatcatattttttgttcaagaggttagttcaagaattctctcaagagataaaatggcgtgatgatcattacattccaaaaacaatagaggaacacctggaactttcaagaaagactgttggtgcctttgaactagcatgtgcttcttttgttgggatgggcgaccttgtagcaaaggaaactcttgattgccttttgacttatccagaacttcttaagtctttcacaacatgtgtacggctctcaaatgatattgcttcaacaaagcgtgaacaagcaggggaccaccaccatgcttctacaattcagagttatatgctccaacatggtgcaacagcgcatgaagcatgcgttgggataaaggagttgatagaagactcatggaaggatatgatgaaagaataccttacaccaacagacctgcaaccaaaaatcgtggcaagaacggttattgattttgcgcgaacgggtgattatatgtacaagcaagttgattcattcactatttcacatacaatcaaggatatgatagcatcgctctatatggagccgtataacatttaa

SEQ ID NO: 358 - protein, 605 aa, Oryza sativa
MSSPPAAFSNEGDEQPQRRAPTSFHPSGAISSSVTSHLLRLRQLLSYYILSPYFNVTDYLLYVYMHAYMKERVQVVKEEVRKVVKGSSEVPQILDLVITLQRLGLDSYYETEINDLLCIVYNTDYNDQDLHLVSLRFYLLRKNGYDVSSDMFQHFKDKEGSFVADDVRSLLSLYNAAFLRTHGEKVLDEAIVFTTNRLRSELEHLKSPAADEVSLALNTPLFRRVRILEIRNYIPIYESATTRNESILEFAKLNFNLLQLIYCEELKSITGWWKELNVESNLSFIRDRIVEMHFWMIGACSEPHYPLSRIILTKMIAFLTILDDIFDTYATTEESMMLAKAIYMCNETATVLLPKYMKDFYLYYLKTFDSFEEALCPNKSYRVCYLKELNISNSTNNTDCFILRGNYGNHFIYDILMTQSYFLFKRLVQEFSQEIKWRDDHYIPKTIEEHLELSRKTVGAFELACASFVGMGDLVAKETLDCLLTYPELLKSFTTCVRLSNDIASTKREQAGDHHHASTIQSYMLQHGATAHEACVGIKELIEDSWKDMMKEYLTPTDLQPKIVARTVIDFARTGDYMYKQVDSFTISHTIKDMIASLYMEPYNI

SEQ ID NO: 359 - DNA, 2328 bp, Oryza sativa
  misc_feature (361)..(361): s = guanine or cytosine
  misc_feature (445)..(445): h = adenine, cytosine, or thymine
  misc_feature (535)..(535): y = cytosine or thymine
atgggaacacgtccttgtaagaagtcaacaccgcttagcaccgccgactcgtcttaccctcacactgacaagtgggacccacgagatgggtacaaaccacagtccagagctgacgactgcgggcccaccagttcgcggcggatcagccggctgcgccgcctctccgccgacgagcggcagcgggagacggagacggaggcgctaatagcgctctcgctgggcttccccattgacgagctgctccccgccgagcggcccctcctgccggcccccgtcgccgccgcccccaacgactacatcgtcgtccgcaaccacaatcctcgcctcgtggcgcgccgacccgcgggtgccgctcccgcgstcgcgcgtgcaggagaccgtcgccgccagctacgaaaaccttgtcgccctggcgcacgggttcctcgcccgggagggccacathaatttggggtttccgccgcgttccccgcctccccaccacccgatgcgccgcagggcctcgccgcatccgtgctcgtcgtcggcgccggtytcgccggcctcgccgccgcgcgccagctgctccgattcggcctccgcgtgctcgtcctcgagggccgcgcccgccccggcggccgcgtctacaccactcatctcggcggggaccaggccgccgttgagctcggcggcagcgtcatcaccggcatccacgccaacccgctcggcgtgctcgccaggcagctcgggattccactccacaaggtgcgagacagttgcccgctctaccaccacgacggccgcaccgtggacatgaagctggacaggagcatggatctggtgttcaacacgcttctagaacacgccacccggctgcgagagtatctcaagaaggcagccgaggggatctcgctaggggaaggtatagagaggctgagacgcttttacaaggtggcgaaaagcgtcgaggagagggaggttctggactggcatttggctaacctggaattctccaatgccggctgcctatcggagctctcgctcgcgcactgggaccaggatgaccagtatgagatggggggagaccattgcttcctagccggagggaatgcgaggctggtacacgcattgtgcgatggtgtgccggtgttgtatgagaagacggtgaagcggattgagcatggggaggatggggtgagcatcaccgtggaaggaggccaggttttcaaggctgacatggcactctgcactgctccacttggagtgctcaagagcaggagcatcatttttgaaccggagttgccagagaggaagcttgaagcaatccagaggttggggtttgggttgttgaacaaagtcgccatggtgtttccccatgtattttgggatgaggagattgacacatttgggtgtttgaataaggagaggagcaagcgtggcgagttctttctcttctacagctaccacactgtctctggtggtgcggtacttatcgcacttgttgcgggagaagctgctttggagtttgaaaaggttgatcctgctgtagcacttcatagggtccttggtattcttaaaggtatctatggccccaaaggtgttacagtgcctgatcccattcaatcatgttgcacaagatggggtagtgatcctctttgctcaggttcatactctcacatcagagttgggtcttctggcactgactatgatattctcgctgagagcgtcaatgaccggttattctttgctggagaagcaacaaatcgtgcataccctgcaacaatgcatggagctttattgagtggactaagggaagcttccaagattctccatgcttcggaaagtagattgaattctgattataagaagtatgccctgcagaaaagcatcagacttataaataatgtactggacgaccttttcatggagccagatctagaatgtggaagattctcgttcgtgttctcctatattacacctgaggaggaacaggctccgggattggctaggattacacttgagaagcctttgcttctgccttccaagaaacgcaaagtaaagggtaatcagaaggatcaggaccctgtggctgagaagatagaccaagaggtgttttatttatacgccaccgtctcgcaagagcaagcaactgaactattggaatgcgacaatgataaaagtaggatagcagttctatgcaaagatcttggtgttaaactaatgggttacgacagtacatacgatgtactattggattcttttagggaggctactattgttttcatcttcccccttttttttctagatgttgttcctaatattggtatctggcagtttatgtgttgctga

SEQ ID NO: 360 - protein, 775 aa, Oryza sativa
MGTRPCKKSTPLSTADSSYPHTDKWDPRDGYKPQSRADDCGPTSSRRISRLRRLSADERQRETETEALIALSLGFPIDELLPAERPLLPAPVAAAPNDYIVVRNHNPRLVARRPAGAAPALARAGDRRRQLRKPCRPGARVPRPGGPHQFGVSAAFPASPPPDAPQGLAASVLVVGAGLAGLAAARQLLRFGLRVLVLEGRARPGGRVYTTHLGGDQAAVELGGSVITGIHANPLGVLARQLGIPLHKVRDSCPLYHHDGRTVDMKLDRSMDLVFNTLLEHATRLREYLKKAAEGISLGEGIERLRRFYKVAKSVEEREVLDWHLANLEFSNAGCLSELSLAHWDQDDQYEMGGDHCFLAGGNARLVHALCDGVPVLYEKTVKRIEHGEDGVSITVEGGQVFKADMALCTAPLGVLKSRSIIFEPELPERKLEAIQRLGFGLLNKVAMVFPHVFWDEEIDTFGCLNKERSKRGEFFLFYSYHTVSGGAVLIALVAGEAALEFEKVDPAVALHRVLGILKGIYGPKGVTVPDPIQSCCTRWGSDPLCSGSYSHIRVGSSGTDYDILAESVNDRLFFAGEATNRAYPATMHGALLSGLREASKILHASESRLNSDYKKYALQKSIRLINNVLDDLFMEPDLECGRFSFVFSYITPEEEQAPGLARITLEKPLLLPSKKRKVKGNQKDQDPVAEKIDQEVFYLYATVSQEQATELLECDNDKSRIAVLCKDLGVKLMGYDSTYDVLLDSFREATIVFIFPLFFLDVVPNIGIWQFMCC

SEQ ID NO: 361 - DNA, 1926 bp, Oryza sativa
  misc_feature (1835)..(1835): r = adenine or guanine
atgtggaagctcaagattgccgagggaggaccatggctaaagagtggaaacagtcatgttggaagagaaacatgggaatttgacccaaattttggaacaagtgaagagcgggaggcggttgaggctgcacggatagagttccagaagaataggttcagaacaagacacacctccgatgttttggctcgcatgcaggtataatgaaaacgatgggcactggccaggggatttcccaggcccactgtttaccactgcaaccatggaacatcacaaggagatctgtcgatatctgtacaatcgtcagaccagaacatcgatggaggatggggactacatgcagaaggtgaaagttccatgcttagcacagctctcaattatactgctctgagactacttggggagaatgttgatgatggaccagatatatccatgcataaagcaagaaaatggatacatgaccatggaggtgcaacaatgataccgatcttgggaaaagtgtggctctcgcttggagtttttgactggtcaggtgtaaatcctattcccccagaattatttcttcttccatctttcgttcctatccaaccagcccatgtcttatttgtatggaaaaaagtttgtcggtcctataacaagattggttatatcattaagggaagagctacatattcatccctataaaaagattgactggaaggaggcacgcaaattatgtgcaaaggaagatgcctataatccacatatgtggctacaagagtgcctatctgactgcctttatagttttggtgagccgtttcttacacgttggccaatttcctacatgagaaaaagagctctataccaaattgctgagttcttgaagtatgaagatgaaaattctcagtatatctgcattggtgctgcacagaagttatccatgttgtgctgttggattgaaaatcccaattcagatgcattcaagcgtcatttggctagagtagctgattttctatgggttggcgaagatggcatgaaagttcggtgggatgttgctttcgcagtccaagcgatattagcgtgtagcatcgcagaagaatttggaagtacccttaagaaagcacatggtttcataaaaacttcccagaatccttctggtgacttcagcagaaagtaccgtcacatatctaaaggaggatgggccttccaggttgcagatcaggggtggcaggtttcagattgcacagcagaagctcttaagacagagatatatgcagacatcattgtggagcattacgtagagtgtacctcatcagtcatccaagcattggcattgttccgggagaagtaccctgggcatcggaaagatgaaatagatcaatgcatcaggaaagcaacagaattcatcgagaagttacagaatgatgatggatcatgggatcatggggtatttgcttcacgtatggaacatggtttgcaatagagggtctgtcagccgtggggcagtgttatgatgacagcacctgcattcggaaagcctgtaagtttctgttatcaaagcaactaacaaatggtggatggggggagagtcatctttcatccagaaccaaggtcaatactgcatgggcaatgttggcactcatgaaagctggacaggtattacttctctcacaggtagagagagaccccgctcctctgcacaaagcagcaagacttatcatgagcatgcagctcagtgatggtgactttccacaagagggaagtttcttgaaaaatggccccttgtgttatatggcttatcgcaatatattcccaatatgggctcttggagagtatcagaaattagtatttcagaactrtcagacctctagcatcaagcaaacaaatatagctccatctgctggcaatgctgctctgaagaattcagcaagtacaacagcgccaacttga

SEQ ID NO: 362 - protein, 664 aa, Oryza sativa
  X_region (170)..(170): Xaa = any naturally occuring amino acid
  X_region (199)..(209): Xaa = any naturally occuring amino acid
  X_region (316)..(316): Xaa = any naturally occuring amino acid
  X_region (353)..(359): Xaa = any naturally occuring amino acid
  X_region (395)..(397): Xaa = any naturally occuring amino acid
  X_region (635)..(635): Xaa = any naturally occuring amino acid
MWKLKIAEGGPWLKSGNSHVGRETWEFDPNFGTSEEREAVEAARIEFQKNRFRTRHTSDVLARMQVNENDGHWPGDFPGPLFTTATMEHHKEICRYLYNRQTQNIDGGWGLHAEGESSMLSTALNYTALRLLGENVDDGPDISMHKARKWIHDHGGATMIPILGKVWLSXLGVFDWSGVNPIPPELFLLPSFVPIQPAXXXXXXXXXXXMSYLYGKKFVGPITRLVISLREELHIHPYKKIDWKEARKLCAKEDAYNPHMWLQECLSDCLYSFGEPFLTRWPISYMRKRALYQIAEFLKYEDENSQYICIGAAQKXLSMLCCWIENPNSDAFKRHLARVADFLWVGEDGMKVXXXXXXXRWDVAFAVQAILACSIAEEFGSTLKKAHGFIKTSQXXXNPSGDFSRKYRHISKGGWAFQVADQGWQVSDCTAEALKTEIYADIIVEHYVECTSSVIQALALFREKYPGHRKDEIDQCIRKATEFIEKLQNDDGSWGSWGICFTYGTWFAIEGLSAVGQCYDDSTCIRKACKFLLSKQLTNGGWGESHLSSRTKVNTAWAMLALMKAGQVLLLSQVERDPAPLHKAARLIMSMQLSDGDFPQEGSFLKNGPLCYMAYRNIFPIWALGEYQKLVFQNXQTSSIKQTNIAPSAGNAALKNSASTTAPT

SEQ ID NO: 363 - DNA, 555 bp, Oryza sativa
atggcgagcacatccaagggaacatgtgatcaaagccaaattccatcgacaacgatggatccttccgatgaagctccctcggggaaaaaaagtgacggacaaattccggcgccggcgccggttacctccgatgaaggcaaggcgccggtgatggagaagaagaagaagaagaagaaggcgaagacgaagatggtgcggtttacccaagcgcagatcaacaactgcatcacgtacaaggaagaggagatgcccgactacgacaacatgccgagtatcattgagatcctcggcgacgacctcgcgaattgtcctcaagactacatcgatgaactcaaggcgatcgacgacagccgagaagaggacaaggctttctggataaagatgcagaacgaaatccggggtgaacgggaggggatcctcaggcagtacttcaccaaaggctatgccgagtacgaggtcgacatcgacgacgacgacgacgacaaagacaataaagttcctgctcgagttgctgctcccctagccggagaaggttccgcaatggagtcgccgtga

SEQ ID NO: 364 - protein, 184 aa, Oryza sativa
MASTSKGTCDQSQIPSTTMDPSDEAPSGKKSDGQIPAPAPVTSDEGKAPVMEKKKKKKKAKTKMVRFTQAQINNCITYKEEEMPDYDNMPSIIEILGDDLANCPQDYIDELKAIDDSREEDKAFWIKMQNEIRGEREGILRQYFTKGYAEYEVDIDDDDDDKDNKVPARVAAPLAGEGSAMESP

SEQ ID NO: 365 - DNA, 1285 bp, Oryza sativa
  misc_feature (153)..(153): y = cytosine or thymine
  misc_feature (201)..(201): s = guanine or cytosine
  misc_feature (204)..(204): k = guanine or thymine
atggcggcggcggaggaggggcagtgggtgctcatggccaccggccgatctcccaccaacatcgccgtcatcaagtactgggggaagagggacgaggcgctcatcctccccgtcaacgacagcatcagcgtcaccctcgaccccgaccacctytccgccaccaccaccgtcgccgtcagcccttccttcccctccgaccgsatktggctcaacggcaaggagatctccttgtcaggagggaggtttcagagctgcctgagggagatccggaagcgtgctcaagatgtcgaggatgagaagaaggggatcaggatcaagaaagaggactgggggaagctacatgtacacatagcatcgttcaacaacttccccactgctgctggtttggcctcttcggctgctggcttggcttgttttggttttcacccttggaaagctaatgaatgtgaaagaagatcatggtgaactttcttccatagcaagaggcaagggtctggaagtgcatgccgcagtatatatgggggattcgtgaaatggtgtatgggaaaagatggaagcgacagcatagctgtacaacttgctgatgaggcacactggaatgatcttgttattatcatagcggtggaaacaagtagcactagtgggatgcgagacagtgttgaaacaagtccccttttgcaatatagggcccaggtagttccagaacgggtgttgaaaatggaagaggctatcaagtctcgtaattttgagtcctttgccaggttaacttgtgcagatagcaaccaatttcatgctgtatgtttggacacgagccctcccatcttctatatgaacgatacatcacacagcacaggataattagccttgtggagaagtggaaccagtcagaaggaaccccacagcaggttgcttacaccttcgatgctgggcccaatgctgtcctaatcgcaccaaaccgcaaaaatgcaaccattctccttcagaagctcttgtattatttccctcctcaagataatgatctcagcagagctatatggttggcgacaagtcgattctaagcgatgctggactgaaatcgatagaagatgtggaggccctcccagctcctgccgagacgaagatgccgagccaaaaattcaagggagatgtgagctacttcatctgtagcaggcttggagctggcccaaaagttgtcactgacgaaagcctagcattgatcgattcggtcacggggctccccaagggagtgtagctgaaactatgtcattcggagagtttgtactga

SEQ ID NO: 366 - protein, 426 aa, Oryza sativa
  X_region (94)..(94): Xaa = any naturally occuring amino acid
  X_region (99)..(99): Xaa = any naturally occuring amino acid
  X_region (161)..(161): Xaa = any naturally occuring amino acid
  X_region (183)..(184): Xaa = any naturally occuring amino acid
  X_region (214)..(219): Xaa = any naturally occuring amino acid
  X_region (240)..(240): Xaa = any naturally occuring amino acid
  X_region (292)..(292): Xaa = any naturally occuring amino acid
MAAAEEGQWVLMATGRSPTNIAVIKYWGKRDEALILPVNDSISVTLDPDHLSATTTVAVSPSFPSDRIWLNGKEISLSGGRFQSCLREIRKRAXRCRGXEEGDQDQERGLGELHVHIASFNNFPTAAGLASSAAGLACLVFTLGKLMNVKEDHGELSSIAXRQGSGSACRSIYGGFVKWCMGXXKDGSDSIAVQLADEAHWNDLVIIIAVETSXXXXXXSTSGMRDSVETSPLLQYRAQXVVPERVLKMEEAIKSRNFESFARLTCADSNQFHAVCLDTSPPIFYMNDTSHXHRIISLVEKWNQSEGTPQQVAYTFDAGPNAVLIAPNRKNATILLQKLLYYFPPQDNDLSRSYMVGDKSILSDAGLKSIEDVEALPAPAETKMPSQKFKGDVSYFICSRLGAGPKVVTDESLALIDSVTGLPKGV

SEQ ID NO: 367 - DNA, 267 bp, Oryza sativa
atgtcgtgccagtgctcacgctgctactgctaccactactacctctacaccgacaagaacagggagaaccgcatcaatggcttcaaacaacgatctagtgctcaaggcagtgcgagtaggcaacgatggaaggaggcgatgaactgcctccatgttgactcttccaagcccctcgagcactccagtccatcaagctctgcctcccttgagatcaaactctgctacagcgagcttatgaagaacgaaggtggtagagctcaagcttga

SEQ ID NO: 368 - protein, 88 aa, Oryza sativa
MSCQCSRCYCYHYYLYTDKNRENRINGFKQRSSAQGSASRQRWKEAMNCLHVDSSKPLEHSSPSSSASLEIKLCYSELMKNEGGRAQA

SEQ ID NO: 369 - DNA, 1209 bp, Oryza sativa
atgaaaaagttcaaaaagcaccaaaacatgatttttggacatattggagtgtactggaaacatacatatgataggaagagatcgacaggagaccccacaggattgcgcagtggtgaaaacgggagcacagtagggatcgatggcgattggactccacaaggagatcttgatgacgtgcgcggagagtgcgacgatgctgccatcactgatctggctctggccaacacgtcacgacacgagcgaaaactggagggggcaggcgcgtggacgtcacagcctctcgtggccttggagcccagcgcagacatgagaagagcctggccttcaacgatttgggacgacctcctccgcctgctcgccgtcgtctccatcgccgccgcagcagccgctgcctgcagccttctcaaccgccgccccaaacccttgtgcgacagcggcggcgccgcctatacccaccatgacggaaacctggagtgcgtccagggattcaacaaatatggcaacctgtgcatagaggatgggctgtcacagttgctagagcggaggatctgcgatcaatatgcccgtgctttatgtggccaacctgccaaaatcttgttccaagagctcgatatcttaaacatggctgatgagctgttatccaagggttttgttggcctaagtcaggatggagctaaggttgcaaaaattaaggttctggacagtgcgcgggccttctttgagaaaacattcagctccgacggagtcgaagagtttaaatgtccagacctggttgccgagctttataggcccctgacctgtcaaattcggcaatggatctcaagaaatatcatgtctgtgacagcctttggtgtcctggtgtgtgaggtccttgaagataatgccatagatgcaaagattggcaactctgaatgtgagccttgggtggtcacgtcttggctgcgagatcatctgctagtcccacaagagagaaggaatgctttcctttggaagaaggtggaagaactaatactggaagattctcgcatagatcaatacccgaaagtggtcaagggagagtcgaaagttgtttatgagtggcaagcgagcggctcgctcagtggaaagaaaaaggttaagaagatgcaaggtgtagcagcaggcaagtcaagagccgatggtgcagctggcggcgccataaaacttgctgaagaactggatgcaggctag

SEQ ID NO: 370 - protein, 402 aa, Oryza sativa
MKKFKKHQNMIFGHIGVYWKHTYDRKRSTGDPTGLRSGENGSTVGIDGDWTPQGDLDDVRGECDDAAITDLALANTSRHERKLEGAGAWTSQPLVALEPSADMRRAWPSTIWDDLLRLLAVVSIAAAAAAACSLLNRRPKPLCDSGGAAYTHHDGNLECVQGFNKYGNLCIEDGLSQLLERRICDQYARALCGQPAKILFQELDILNMADELLSKGFVGLSQDGAKVAKIKVLDSARAFFEKTFSSDGVEEFKCPDLVAELYRPLTCQIRQWISRNIMSVTAFGVLVCEVLEDNAIDAKIGNSECEPWVVTSWLRDHLLVPQERRNAFLWKKVEELILEDSRIDQYPKVVKGESKVVYEWQASGSLSGKKKVKKMQGVAAGKSRADGAAGGAIKLAEELDAG

SEQ ID NO: 371 - DNA, 333 bp, Oryza sativa
atggtagaacttcaggggcacagggaaggattttcgataggctttgatgagcaggggaacagtttggtgaggtggtggggaatagacctcaaatcggcggcggcggcggcggcggtggcgagccaagatttacatcggcggcgacggcggcggtggcagcgacatggatctcctaccgtcctccagcagccagatgatagcacgggcgttaccggcggcgtggttctaaagggacgggaaagaacgatggagcagacaaaagacctaaggctcgtcgtgcatcggacggccagaaacatgcatgggctgatccaatggccagcaagcacatga

SEQ ID NO: 372 - protein, 110 aa, Oryza sativa
MVELQGHREGFSIGFDEQGNSLVRWWGIDLKSAAAAAAVASQDLHRRRRRRWQRHGSPTVLQQPDDSTGVTGGVVLKGRERTMEQTKDLRLVVHRTARNMHGLIQWPAST

SEQ ID NO: 373 - DNA, 195 bp, Oryza sativa
atgcatgcgtgcattcatgcagagacagtagcgaagcggcggaaccggcctggtgcgggcggaggcagcggcggcctggcacgaatttgtgatgtatttggagatgatcgatttgaggattcggagaggatccttttgatatgtgatgtgatgatcaatttgggattttacaatttggggatgatttgggaatag

SEQ ID NO: 374 - protein, 64 aa, Oryza sativa
MHACIHAETVAKRRNRPGAGGGSGGLARICDVFGDDRFEDSERILLICDVMINLGFYNLGMIWE

SEQ ID NO: 375 - DNA, 1878 bp, Oryza sativa
atgtacccggtggtgacggggccgccgccggcgaggctgccggcgtcgacgcgggtggacaaggcgacgagccacctgctgcagggccccgactgggccatcaacctcgagatatgcgacaccctcaacgccgaccgctggcaaacaaaggatgtggtaaaagctgtgaagaagcggttgcaacataaagatccaagagttcagtttttcactttgacgttgttggagacaatgatgaagaactgtggtgaatatgtccattttgaagttgttgaacaacatattttgcaagaaatggttagaattgtccagaagaagcatgatactcaagtgagggataaagtattgatacttctggactcatggcaagaagcatttggtggacctggaggcaaatatccacagtattactggtcatacattgaacttaagaggtcaggaataatgtttcccaggcgccctgtagatgctcctccaatatttactccccctgcaacacatcatactcagtcttatggttcacctacatatcctgctggaagtctaaatgagagaatgacatccgatgttgaaactctgagtttaggggacttaaataatattagagatacaacagaacttctgtgtgatatggtgaatgctttgaatccttctgatcgcatggctgttaaagatgaaattatttcagagcttgtcacccaatgccgatcaaatcaacaaaagctcatgcgatttgtcagttccacaggaaatgaggagctactgaagcaaggcctagaaatcaatgatcacttacagagcgtacttgcaaaacatgatgccattgcttctggagctcctttgccggtcgaaacaccaaggaaagacgagatacccagagaagatccaaaaataaagccatctgcacctccgattgcacctccatccgcacctccagttgaagaggatgaagatgacgagttcgctcagatagcaagaagaaaaaacaaatctgtgataagtagtgatgaggcatcatccagtgctggtgatcaggcccttgtacccgttgacccagtaacttctgaagcctcatcttctgttgcaagcaatgcagtggtgcctgttgactcgtctcctgccagtggtactcggacaagagagcaggacatgatcgaccttctaagcctcaccctgtacagcccccctgaagcatctacagattcttcttcacagacccaaaatggcacgcagcagtctgtcacgtcaaatgggccagaattaccaccaaactatcagcctgctgcatcaaatggatcacattactcttctaaccagcaggcatatccaacgaatcaagcttacaccccatacaacaattatgttgtaccttgggcccaagctggacagggcacacaggctggaggagcatatcaaactcagcccatgcaacaatatggatctagctacccagcaccaccatgggcgatgccagcaagtgtcaactcaaccaatccttttcagcctgcaacataccagatgcagaaccctcctgttgcttctgttgcccccacaaatacctatccagctccttcatcgccgtatgctgctccgccaaggcaacaagtgccatctcctgcaaccaaaccgatgcaacagtacaactcctttgtttctcaaacaagaagtggtccggcaatggctcaagatgttagaatgaatggtaatccacggccatcagaaactacagcggctgcggccaaaccatactacatgccagacaatttgtttggtgatttgattgatgtgaagagttatggtggaggcaagatgagtagaacggcgagcatgcctagtccaaatggcagtggccaacctttgctgggtgggaagaaatag

SEQ ID NO: 376 - protein, 625 aa, Oryza sativa
MYPVVTGPPPARLPASTRVDKATSHLLQGPDWAINLEICDTLNADRWQTKDVVKAVKKRLQHKDPRVQFFTLTLLETMMKNCGEYVHFEVVEQHILQEMVRIVQKKHDTQVRDKVLILLDSWQEAFGGPGGKYPQYYWSYIELKRSGIMFPRRPVDAPPIFTPPATHHTQSYGSPTYPAGSLNERMTSDVETLSLGDLNNIRDTTELLCDMVNALNPSDRMAVKDEIISELVTQCRSNQQKLMRFVSSTGNEELLKQGLEINDHLQSVLAKHDAIASGAPLPVETPRKDEIPREDPKIKPSAPPIAPPSAPPVEEDEDDEFAQIARRKNKSVISSDEASSSAGDQALVPVDPVTSEASSSVASNAVVPVDSSPASGTRTREQDMIDLLSLTLYSPPEASTDSSSQTQNGTQQSVTSNGPELPPNYQPAASNGSHYSSNQQAYPTNQAYTPYNNYVVPWAQAGQGTQAGGAYQTQPMQQYGSSYPAPPWAMPASVNSTNPFQPATYQMQNPPVASVAPTNTYPAPSSPYAAPPRQQVPSPATKPMQQYNSFVSQTRSGPAMAQDVRMNGNPRPSETTAAAAKPYYMPDNLFGDLIDVKSYGGGKMSRTASMPSPNGSGQPLLGGKK

SEQ ID NO: 377 - DNA, 1020 bp, Oryza sativa
atggcgaagcggcgggcagagtccgagcttgagcaggtggaggccgaggcggaggcggaggcggaggcggagaagaatgggaggcgagcagctggtagtcaggacggggtgaatcgcgcgttgatcctcgactgcagcaaacatagcgatggatcgatctacagcggcgacgattttttggcacaggttttacaagctctcaaggaggcaatgatgctgtcaaatccaaccaattgccgaccacacatgtgggcttgcaatattcacgaagaacaattcatgatgcagatattctcgctcaagttatccaatatcactgctactgttgatggcccagttcacttgtatggatactttgcagtacgggatcatttggacccgctacgcaactacatcttcaaccgcaccagagatgatcctttcatcatggggcaagacaatggtgttgattcagataattccttgataccaatgcctggccccaagagaggcattggaaaccaagctcgtgtgctcattgagtttgacatgaagatcaagaatggagagacacgagatgatgattttcagctcatagatggtgctatcatctgcagcgaattcgtgcttcccaatagagtgtttacgcaacggattgagggtgattgtggtgcggtggacataagtcttgcacttctccacagtacggtggaggccacagtacaagttagcatatcacaagtgcatggcaatggcttcagcttatctttatattcttataccagtagaatccctgaaaaaattcagctcttcgatggattcatttccaagccatgtgatctgaataggtttgtagttgctgtggtggtgaatactcccttgattttaatcttcaagattgacaagagagatggctcagatcatgttcctggatgttgtgcgttcaaagctagaacacatggatatgagtatgacatgcaagagctcaaacttggttgcaccaatatactggtgaagctgtcttggtcaactttggagtga

SEQ ID NO: 378 - protein, 339 aa, Oryza sativa
MAKRRAESELEQVEAEAEAEAEAEKNGRRAAGSQDGVNRALILDCSKHSDGSIYSGDDFLAQVLQALKEAMMLSNPTNCRPHMWACNIHEEQFMMQIFSLKLSNITATVDGPVHLYGYFAVRDHLDPLRNYIFNRTRDDPFIMGQDNGVDSDNSLIPMPGPKRGIGNQARVLIEFDMKIKNGETRDDDFQLIDGAIICSEFVLPNRVFTQRIEGDCGAVDISLALLHSTVEATVQVSISQVHGNGFSLSLYSYTSRIPEKIQLFDGFISKPCDLNRFVVAVVVNTPLILIFKIDKRDGSDHVPGCCAFKARTHGYEYDMQELKLGCTNILVKLSWSTLE

SEQ ID NO: 379 - DNA, 1047 bp, Oryza sativa
atggcgaacaagggaggagagccggcagcaagagcagctgtgcgccatggtggaggccccgtcgcgttcaaggacgctgtcgacgtcgacgccacgccggtgcgccctccgacggagctcgccgccgccgtctccgccctgccggcgggcgtctcctacggccagccgatgcgctgctacggggggacctgggtgttcgagagctgggcgcagggcgtggtcgccatgcaccgcggcggcctcgtgccccgcgccggcgacgtcctcctcgccagcctccccaagtcggggacgacgtggctcaaggcactcgcgttcgccaccatggcgcgccgcgcgtgcccgccgccggcgagccccgaccacccgctccgccgcctaaacccgcacgactgcgtgcccctcctcgacaggctcttcgccgccggccgcgacgcgcttctcgacgagctgccgtcgccgaggctcatgtgcacgcacatgccgctctcgctgctgccgccggcggtggctgacggcaactccaacaccaagatcatctacatttgcagggaccagaaagatagattggtctccatctggcactttcggaaacgcaatgtgccagatctgttgctccaagaagtgtatgagtctatatgtgatggcactgggtttgctggtcctgtctgggatcacttgcttggttactggagggcaagcaaaatagatctaggccgagtgctcttcttgaaatatgaggaggtgcttcgagacccagtgaacaccgttagagagctcgcacaatttgtcgggcagccattctctgacacagaggaagaagctggcattgttgcggagatcgtcaagctatgtagcctagagagtctaaggagccagaaagccaacaaagaaggcatacaaggtgtgtacatcaagttctcgcacgactcgtattttaggaagggggtggaaggggactggaggaaccacatgactcctaagatgggcgaacatctggattcgattatgcgagaaaagtttgatggatcggggctcaccatatga

SEQ ID NO: 380 - protein, 348 aa, Oryza sativa
MANKGGEPAARAAVRHGGGPVAFKDAVDVDATPVRPPTELAAAVSALPAGVSYGQPMRCYGGTWVFESWAQGVVAMHRGGLVPRAGDVLLASLPKSGTTWLKALAFATMARRACPPPASPDHPLRRLNPHDCVPLLDRLFAAGRDALLDELPSPRLMCTHMPLSLLPPAVADGNSNTKIIYICRDQKDRLVSIWHFRKRNVPDLLLQEVYESICDGTGFAGPVWDHLLGYWRASKIDLGRVLFLKYEEVLRDPVNTVRELAQFVGQPFSDTEEEAGIVAEIVKLCSLESLRSQKANKEGIQGVYIKFSHDSYFRKGVEGDWRNHMTPKMGEHLDSIMREKFDGSGLTI

SEQ ID NO: 381 - DNA, 684 bp, Oryza sativa
atgcagggggcgcgtgttaatctgaaggggtggcaacaggctgctgttgcattcggttctgcatttggggccttgcttgaccctagaagagctgatctgatagctgctcttggggagactactgggaagccagcatttcagcgtgtgcttcagcggatgaggaacagtgctgaaggcagggatgttctcctggagcgtcctcgagttatatccacacaagtttctcatgcctgggacatgcctcagaacacatttggtgcagcatatgctcagttcatgggatcaaggaacttctcaccggatgaccgcccacctgtccgtttcatggatacagatgagcttgcgtatgttgcgacccgcgcccgtgaagtccatgacttttggcatgtgctgttcggccttcctacgaacctgattggagagactgcccttaaggtcattgagtttgaacagatgttccttccaatgtgcatgctttcagtcgttgggggctctgcgaggttcaatgagaaacaaaggacactgttttttcagcattatttcccatgggcttcaaaagcaggtcttaagtgcacagatcttatgtctgtgtactatgagaagcattttcatgaagatttggatgaagtgaggaggaactggggaattataccatgccctgatcccaaaaggagcagtgtttag

SEQ ID NO: 382 - protein, 227 aa, Oryza sativa
MQGARVNLKGWQQAAVAFGSAFGALLDPRRADLIAALGETTGKPAFQRVLQRMRNSAEGRDVLLERPRVISTQVSHAWDMPQNTFGAAYAQFMGSRNFSPDDRPPVRFMDTDELAYVATRAREVHDFWHVLFGLPTNLIGETALKVIEFEQMFLPMCMLSVVGGSARFNEKQRTLFFQHYFPWASKAGLKCTDLMSVYYEKHFHEDLDEVRRNWGIIPCPDPKRSSV

SEQ ID NO: 383 - DNA, 1739 bp, Oryza sativa
atggctgccacgtcccgcgcgccgtccacgctggccccggcgtcgttctccgccgccggcggcagcaggaggcggcgccggtgcccgaatcccagggtgcgggtggggttgggggtgcggtgctcgctcgacagcaacgtctccgacatggccgtcaacgttgttcccgccggagccggagcactacagggggccgaagctgaaggtggccatcataggggccggcctcgccggcatgtccaccgcggtggagctcttggaccagggccatgagaggttgatctgtacgagtcccggccgtttatcggcggcaaagtcggttcttttgtggataggaaagggaaccatatcgagatggggctgcacgtgttcttcgggtgttacagcaatcttttccgccttatgaagaagaggttggagctgataataatctgctagtgaaggagcatacccatacatttgtaaataaaggaggcacgattggtggaacttgattttcggtttcctgtgggagctccgttacatggtatccaagcattcctacgaactaaccaactcaagaggtttatgataaagcaagaaatgccgttgctcttgctctaagcccagttgttcgagctcttgttgatccagatggtgcattgcagcaagtacgggatttggatgattaagtttcagcgattggttcttgtcgaaaggtggtactcgagagagcatcacaaggatgtgggatcctgttgcctatgctcttggtttcattgactgtgataatatcagtgcacgttgcatgcttaccattttcactctgtttgccacaaaaacagaggcatctttattacgcatgctaaagggttcacctgatgtttatctgagtggtccaataaagaagtacataacagacaggggtggtagaggtttcacctgaggtggggatgtagggaggttctctatgataagtcacctgatggggaaacctatgttaaaggccttctcctatccaagaggctacaagtagagagataatcaaagcagatgcatatgtcgcaggcttgtgatgtcccggggatcaaaagacttttaccttctgaatggaggcaatgggatacatttgacaacatctacaagttagatggtgttcctgtagtcacagtacagcttcgttataatggatgggttacagaacttcaagatttggagaaatcaagagacaactgaaaaaggcagttggcttggataatcttctctacactccagatgcagatttttcatgtttttcagaccttgcactttcatctcctgctgactactacattgaaggacaaggttccttgatccaagctgtgctaacccctggcgatccttacatgccattgccgaatgaggagataattagcaaggttcaaaagcagcaggtcttagaattgttcccgtcatcacaaggcttggaacttacatggtcgagtgtggtgaaaatcggtcaatcattgtaccgcgagtcaccaggaaatgatccatttagacctgatcaaaagacaccagttaaaaacttcttcctgtctggctcttacacaaaacagcaggactacattgacagcatggaaggggcaactctctcaggcaggagaaccgcggcctacatctgtggtgcaggagaggagctgctcgccctccgaaagaagctcattgtcgacgacagcgagaaggccaggggtaaggtcgaggcccttcagacaagctga

SEQ ID NO: 384 - protein, 578 aa, Oryza sativa
  X_region (405)..(405): Xaa = any naturally occuring amino acid
WLPRPARRPRWPRRRSPPPAAAGGGAGARIPGCGWGWGCGARSTATSPTWPSTLFPPEPEHYRGPKLKVAIIGAGLAGMSTAVELLDQGHERLDLYESRPFIGGKVGSFVDRKGNHIEMGLHVFFGCYSNLFRLMKKRGADNNLLVKEHTHTFVNKGGTIGGELDFRFPVGAPLHGIQAFLRTNQLKRYDKARNAVALALSPVVRALVDPDGALQQVRDLDDLSFSDWFLSKGGTRESITRMWDPVAYALGFIDCDNISARCMLTIFTLFATKTEASLLRMLKGSPDVYLSGPIKKYITDRGGRRFHLRWGCREVLYDKSPDGETYVKGLLLSKRLQVERISKQMHMSQACDVPGIKRLLPSEWRQWDTFDNIYKLDGVPVVTVQLRYNGWVTELQDLEKSRDNXKAVGLDNLLYTPDADFSCFSDLALSSPADYYIEGQGSLIQAVLTPGDPYMPLPNEEIISKVQKQQVLELFPSSQGLELTWSSVVKIGQSLYRESPGNDPFRPDQKTPVKNFFLSGSYTKQQDYIDSMEGATLSGRRTAAYICGAGEELLALRKKLIVDDSEKARGKVEALQTS

SEQ ID NO: 385 - DNA, 783 bp, Oryza sativa
atgtccgaacaagcaaaggcgcacaacctctctccgagtgttagcggtgacgacggggaaccgaacccacgccatcgagctcgtactcccgatgatcgctacactacccaggagttggcgacaaggcgcatcacaactactcgaagattattcgagatcgttgaaagatgtgcccacgtcgacgacgcactaagacgcaagaacgacaaaccgaagactgggggagagaagaagtcagtcgcagacacatctgagtcgagcaagaagaaaaatcgcaaaaaggggaaaaggaaagctcaagcagaagtcctcgcagcagaatacgcgaaccctcccaagcgcccggacccacaaggcagcgacacaaagaaatcatggtgtcccatacacaaaacagatagacattctctagaggattgccttgttttcaaaaagtcgctcgagaagcacatggcatttgaaaaaggcaagcgagtacgcgttgtcgagaagaacgaggagtcacctcctcacgaatcggactccgcgtacccggactccgacctccatgtttcacacatcttcggcggctccacgacgtactcctccaagcgagaatacaagaaagtggaacgcgaagtttgttcgatgtggcagggggatgcacccaggatgaagtggtctgagcagaagatggagttctcggaagcagaccatcccaggaccgcagttatcccaggacggtatccgattgtggtcgaacccactattcggaactatcaaggtagcacgagtcctcattga

SEQ ID NO: 386 - protein, 260 aa, Oryza sativa
MSEQAKAHNLSPSVSGDDGEPNPRHRARTPDDRYTTQELATRRITTTRRLFEIVERCAHVDDALRRKNDKPKTGGEKKSVADTSESSKKKNRKKGKRKAQAEVLAAEYANPPKRPDPQGSDTKKSWCPIHKTDRHSLEDCLVFKKSLEKHMAFEKGKRVRVVEKNEESPPHESDSAYPDSDLHVSHIFGGSTTYSSKREYKKVEREVCSMWQGDAPRMKWSEQKMEFSEADHPRTAVIPGRYPIVVEPTIRNYQGSTSPH

SEQ ID NO: 387 - DNA, 315 bp, Oryza sativa
atgacacgtcgctgccacattcgcagtgccgccttttatgaaacattccagagggattatgcaggtcgagatacgtcggtccatcaaagcaagcgacgaacaagtcagtactccctccgtcaagtttacttttcatgcactaatctcacacgccctaattctaggcgtggcggaccgcatgcagcagagctagctcgatcgatcggcaacagctgcaccccatccaagccgtcgatctgcgtgggcggaccgcatgcagcagagctagctcgatcggcaacagctgcaccccatgcaagccgtcgatctgtatga

SEQ ID NO: 388 - protein, 104 aa, Oryza sativa
MTRRCHIRSAAFYETFQRDYAGRDTSVHQSKRRTSQYSLRQVYFSCTNLTRPNSRRGGPHAAELARSIGNSCTPSKPSICVGGPHAAELARSATAAPHASRRSV

SEQ ID NO: 389 - DNA, 765 bp, Oryza sativa
atgatgctggatgatatggagcagttactgtttactcctatcctacctacagctatagctgcgtgccggggttggggctggcttctcactgtaatccgctctcctaattaccgcattaactcccttcccttcccaccactacagtaccccgctccaccctctcccagtgacacgtgggtcccccctttcctccgcgctttacgtggggaccaccccgcgactgccgcggagaaggcgtcgtcgtcgtcgtcaccgggtcttcgtcgagaccctgacgggggagggtcgctgcctcgtgggccccgctggaggtcaaagagcgtcacagtagctactagacaagataagcgccagccaaagccatcggttactcctcttcctcgctcgctcgctcgctgccttagccttgacctccatcgatattgcaaccataaagaggaggaggaagaggaggcgagaaagagagagagatcgtcttcttctccagccagccagccagccgtgattgatctcaagggggaaggcagctgcagggatcaagaagaaggagaagaagtgatcaaggaaggaaggccacggaacaaccgacagggtatttactccggccatttactccgcttgtctcctttcaccaccacctctcctcttccctcctgctccgccgtagtccatctccatcctccaatctctttctcttcttcttctcttctcttcttctcgggagagggcgctggccggatcgccggagaaggaaccactagctag

SEQ ID NO: 390 - protein, 254 aa, Oryza sativa
MMLDDMEQLLFTPILPTAIAACRGWGWLLTVIRSPNYRINSLPFPPLQYPAPPSPSDTWVPPFLRALRGDHPATAAEKASSSSSPGLRRDPDGGGSLPRGPRWRSKSVTVATRQDKRQPKPSVTPLPRSLARCLSLDLHRYCNHKEEEEEEARKRERSSSSPASQPAVIDLKGEGSCRDQEEGEEVIKEGRPRNNRQGIYSGHLLRLSPFTTTSPLPSCSAVVHLHPPISFSSSSLLFFSGEGAGRIAGEGTTS

SEQ ID NO: 391 - DNA, 1305 bp, Oryza sativa
atggtttatgtacctgaaggccagttcctttcgcggataggtccaactgatttcctcaaggaccttgatgaatttgttggtgctgatgcagtccaggagtggaaaaagcttcttgatgcagttattcctatctctgcagctgcaatggctttgcctccactttccattcgaggtgatttaggtgttctctccacatctgctggtagatatgctccttctctgttgaaatcaatcctgcaaatgggacctcaaggggctcttggtgctacaaaacttctaagacctttctcagagatcgttgattcattgggcctgaaaaacccctttgttcgtaattggatcgatctcttgtgttttctacttgctggagtcaaatctgatggtgctctttctgcagaaatggtttatatgtttgcagaatggtataaaccaggatgctcgcttgagtatcctcttgagggaagcggagcaataatagatgctcttgtgcgaggaataaaaaaatttggtggcaggcttgctcttcgttcgcatgttgaaaagattttaattgagaatggtcgagcagttggtgtcaagctacaaagtggacaaattgtgcgcgcaaggaaagcagttgttagcaatgcatctatgtgggatactttggatttgctgccaccagatgctgtcccaagatcatatcaagacaaagtgaaagcaactccacaatgtgaatcatttatgcatctccacttgggttttgatgtcgagaatgccagagaggaccttggaatccatcatattgtggttaatgattggaacaaaggagttgatgctgaccagaacgttgtattgatatcagttcctactgttcttggaaatggcttagcaccgcctggaaagcacgtcctacatgcttatacaccaggaacagaacctttcagtttgtgggaaggactagataggaaaagcgccgagtatcgaaggctgaaagaagaacgctctgaggtgatgtggaaagccgtggagcttgcccttggtccaagatttagcagagaaaaatgcgatgtgaagctggttggatcaccattaacacacaagaggttcctccgaagaaatagaggaacctatggtccagccataaagctgggggaggccactttccctgggcaggcaacacctataccccagctattctgctgtggtgactcgacttttccaggcatcggtgtaccggccgtcgctgcaagtggtgcaattgtcgcaaacacgctagtctccgtgtcacaacattcagagcttcttgatgctgttggaatttga

SEQ ID NO: 392 - protein, 434 aa, Oryza sativa
MVYVPEGQFLSRIGPTDFLKDLDEFVGADAVQEWKKLLDAVIPISAAAMALPPLSIRGDLGVLSTSAGRYAPSLLKSILQMGPQGALGATKLLRPFSEIVDSLGLKNPFVRNWIDLLCFLLAGVKSDGALSAEMVYMFAEWYKPGCSLEYPLEGSGAIIDALVRGIKKFGGRLALRSHVEKILIENGRAVGVKLQSGQIVRARKAVVSNASMWDTLDLLPPDAVPRSYQDKVKATPQCESFMHLHLGFDVENAREDLGIHHIVVNDWNKGVDADQNVVLISVPTVLGNGLAPPGKHVLHAYTPGTEPFSLWEGLDRKSAEYRRLKEERSEVMWKAVELALGPRFSREKCDVKLVGSPLTHKRFLRRNRGTYGPAIKLGEATFPGQATPIPQLFCCGDSTFPGIGVPAVAASGAIVANTLVSVSQHSELLDAVGI

SEQ ID NO: 393 - DNA, 657 bp, Oryza sativa; identical to SEQ ID NO: 207

SEQ ID NO: 394 - protein, 218 aa, Oryza sativa; identical to SEQ ID NO: 208

SEQ ID NO: 395 - DNA, 871 bp, Oryza sativa
atgaggacgcagcgggagaaggagcagaccgaggtggccgtcgaggagtccttccccttcagggagacggctcctcctgacgagccactggtcaccgccgaggagagctgggtggttaagctcgagcagtccgtgaacattttcctcacgaggagtcagtcatcacgatacttgatggattgtaccgtgaccgcaactacgctagatttttcgtattggagacgattgctagggtgccgtattttggcgtttatctcggtgcttcacatgtatgaaacctttggctggtggaggagagccgattatataaaggtgcactttgctgagagctggaatgagttccatcacctcttaatcatggaagaattgggtggcaactctttatgggttgatcgttttcttgcacggtttgctgcatttttttactacttcatgactgttgcgatgtacatggtgagcccaagaatggcataccatttttctgaatgtgttgagaggcatgcgtactaacctatgacaagtttattaagctccatgaagcagatgagttgaaaaagctaccagctcccgaggcggctttaaactattacctgaatgaggatctttacttattcggatgaatttcaaacagcaagagtcccatgttctaggagacctaaaattggataacttgtatgatgtatttgtcaatatacgagatgatgaggcagaacattgcaagacgatgaaggcctgtcaaacacatggaaaccttcgttctcctcactctatgcagaaatgcttagaaactgacaccgagtgtgtaatacctgaagatgactgtgaaggtatcgtggattgtgtcaaaaaatctcttgtgagtaaagagtga

SEQ ID NO: 396 - protein, 90 aa, Oryza sativa
  X_region (26)..(26): Xaa = any naturally occuring amino acid
  X_region (39)..(39): Xaa = any naturally occuring amino acid
EDAAGEGADRGGRRGVLPLQGDGSSXRATGHRRGELGGXARAVREHFPHEESVITILDGLYRDRNYARFFVLETIARVPYFGVYLGASHV

SEQ ID NO: 397 - DNA, 930 bp, Oryza sativa
atggccaccggtctctccggcggcgctatgaccagcttcgccgtcaagaagccgctcctcgcggccgccgtgcgccgccggtcgtggcccccgccgtcgggccgcgcgctgccgttctcgccgctcacgcggaccccgcgcagccgcgggctcgggaccgtcacgtgcttcgtgccgcagggcacggagagccagcaggccccggctccgtccccgccgccgacggtgcccgtgcccgtgccctcgctggaggaagaggcggctgccgcggcggcgcggcgcatcgcggagaggaaggcgcggaagctgtcggagaggcggacgtacctggttgcggccgtcatgtccagcctcggcttcacgtccatggccgtcgccgccgtgtactaccgcttccattggcaactggagggcggggatgtgccgatgaccgagatgtttggcacgtttgcgctctccgtcggcgcagcggttgggatggagttctgggcgcagtgggcgcaccgctcgctgtggcacgcctccctgtggcacatgcacgagtcgcaccaccgtgcgcgcgagggcccgttcgagctcaacgacgtgttcgccatcaccaacgccgtgccggccatctccctcctcgcctacggcttcttccaccggggcatcgtccccggcctctgcttcggcgcgggcctcgggattacgctgttcggcatggcctacatgttcgtccacgacggcctggtccaccgccgcttccccgtcggccccatcgcgaatgtgccctacttccggcgagtggccgcggcccacaagatacaccacacggacaagttcgagggcgtaccgtatgggctgtttcttggacccaaggagctggaggaggttggtggtctggaagagctggagaaggagcttgcgagaatcaaccggagcttgtga

SEQ ID NO: 398 - protein, 309 aa, Oryza sativa
MATGLSGGAMTSFAVKKPLLAAAVRRRSWPPPSGRALPFSPLTRTPRSRGLGTVTCFVPQGTESQQAPAPSPPPTVPVPVPSLEEEAAAAAARRIAERKARKLSERRTYLVAAVMSSLGFTSMAVAAVYYRFHWQLEGGDVPMTEMFGTFALSVGAAVGMEFWAQWAHRSLWHASLWHMHESHHRAREGPFELNDVFAITNAVPAISLLAYGFFHRGIVPGLCFGAGLGITLFGMAYMFVHDGLVHRRFPVGPIANVPYFRRVAAAHKIHHTDKFEGVPYGLFLGPKELEEVGGLEELEKELARINRSL

SEQ ID NO: 399 - DNA, 1107 bp, Oryza sativa
atggcggaggcggcgggtgatgggggttggccggagccggtggtgagggtgcaggcgctgtcggagagcggggcggcgacgatccccgaccggtacgtgaggccggagacggagcggccgtcgtcgtcgtcggaggcgaacgccgtcgccaacatcaacatcccggtggtggacatgtcgtcgtctccggggacggcggcggcggcggtggcggaggcgtgcagggagtgggggttcttccaggcggtgaaccacggggtgccggcggcgctgctccggcgtgcccgcggcgtgtggcgcgggttcttccagcagccgatggaggtgaagcagcggtacggcaactcgccggcgacgtacgaagggtacggcagccggctcggcgtcgacaagggcgccatcctcgactggggtgactactacttcctccacgtcagaccaccccacctcctctcccctcacaagtggccccacctcccccctgacctcagggagacgacgacagagtacagcgaggaggtgaggaggttatgcgagaggttgatggcggtgatggcggtggggctaggggtagaagaagggaggctacaggaggcgtttggtggtagagagggtgctggagtgtgcgtgcgggtgaactactacccgcggtgcccacagccggatctaacactagggttgtcctcgcactccgaccccggcgggatgacggtcctccttgtcgacgaccgtgtcaagggactccaggttcgccacgccggtgcatgggtcaccgttgaccccgtgcctgacgccttcatcatcaacgtcggcgaccaaattcaggtggtgacgaacgcattgtaccggagcgtggagcaccgggtggtggtgaacgcggcggaggagcggctgtcgatcgcgaccttctacaaccctcggagcgacctgccggtggcgccgctgccggagctcgtgtcgccggagcggccgccgctgtacagccccatgaccttcgacgactaccgcctctacatccgccgcaacggcccccgcggcaagtcccaggtcgatcgcctcgccgccgccgccgccacaatacctaattctactaccaccactcaataa

SEQ ID NO: 400 - protein, 368 aa, Oryza sativa
MAEAAGDGGWPEPVVRVQALSESGAATIPDRYVRPETERPSSSSEANAVANINIPVVDMSSSPGTAAAAVAEACREWGFFQAVNHGVPAALLRRARGVWRGFFQQPMEVKQRYGNSPATYEGYGSRLGVDKGAILDWGDYYFLHVRPPHLLSPHKWPHLPPDLRETTTEYSEEVRRLCERLMAVMAVGLGVEEGRLQEAFGGREGAGVCVRVNYYPRCPQPDLTLGLSSHSDPGGMTVLLVDDRVKGLQVRHAGAWVTVDPVPDAFIINVGDQIQVVTNALYRSVEHRVVVNAAEERLSIATFYNPRSDLPVAPLPELVSPERPPLYSPMTFDDYRLYIRRNGPRGKSQVDRLAAAAATIPNSTTTTQ

SEQ ID NO: 401 - DNA, 1572 bp, Oryza sativa
atggccgcggagatgcgcgcggggctcgccgccgagggcgggagcgacctccagatgctcgtcacctacgttgactccctcccctccggagcgattggtcctcctgatcgaagagagggacttctttctgtacttaatgcttgtgctatgtcgctttctacgtcggatggcgttgatgatagtgttgtggacagtaggcgaaaatttctggagttgtttgattttgttgctgtggctttagcaaaatttgttgcctctgaaggtgaagactgccatcttcctgagggtacccaaagagaactaggttttacattctcctttccagtgaaacaaaaatcattggcatctggcactcttatcaagtggacgaagagttttgcaattgatgaaatggttaatgatacagtagggacattagctgctgggagatatgtgaatcatgatactattgctgctgttatactgggaacaggtagtaatgcagcgtacatagatcatgcagatgcaattccaaaatggcatggatccctgcccaagtctggaaatatggtaataaacatggaatggggtaactttaagtcctcacatcttccacttactgaatttgatcaagagttggatgcagaaagtttgaaccctggcaaacaggtttacgagaaatcgatttctggtatgtatatgggggaacttgttcgaagaatcttactaaagatggctcaagaaactcgcatttttggtgataatatacctccaaaacttgagagaccatacatcttaagatcgaatatacctctttcacgacgaggaaactggttttggatgtttgtgaggccattgcgacacgcggtgcacggcttgctgctgctgggatatatggcattatccaaaagcttggtcagcattctgacagccccagtacgagaaggcaggaggagacgctgggactgggtgggtaccctccgccgccggctgccgcggctacctcccctcttccttccctcctctctcgcatccacgcgacagatcaaaccaaccacccccactaatcgaatccctcacccgattgccccgaccacatcgccgccgccgcggccgatccgaccccgcgagcgagatttaatcatgaatggtgagcttcgtgctctccagcccatcttccaaatctatggaaggcggcaggtttttgctggccctattgtgacactgaaggtctatgaggacaatgttcttatccgtgagttccttgaggagaagggtcatggaagggttctcgtggttgatggtggtgggagcttgcgctgtgccattttgggtggcaaccctgtgcagcaggcacagaacaatgggtgggctggcatcgtcgtcaatggttgcatcagggacgtggatgaaatcaatggctgtgacattggtgtccgggctctgaactcacatcctatgaaggcaaacaagaagggaataggtgagaagcatgtgcctgtgaccatcgcagggaccaggatttgcgacggtgagtggctctatgcagataccgatggcattctcatctcgaggactgaattgactgtgtaa

SEQ ID NO: 402 - protein, 523 aa, Oryza sativa
MAAEMRAGLAAEGGSDLQMLVTYVDSLPSGAIGPPDRREGLLSVLNACAMSLSTSDGVDDSVVDSRRKFLELFDFVAVALAKFVASEGEDCHLPEGTQRELGFTFSFPVKQKSLASGTLIKWTKSFAIDEMVNDTVGTLAAGRYVNHDTIAAVILGTGSNAAYIDHADAIPKWHGSLPKSGNMVINMEWGNFKSSHLPLTEFDQELDAESLNPGKQVYEKSISGMYMGELVRRILLKMAQETRIFGDNIPPKLERPYILRSNIPLSRRGNWFWMFVRPLRHAVHGLLLLGYMALSKSLVSILTAPVREGRRRRWDWVGTLRRRLPRLPPLFLPSSLASTRQIKPTTPTNRIPHPIAPTTSPPPRPIRPRERDLIMNGELRALQPIFQIYGRRQVFAGPIVTLKVYEDNVLIREFLEEKGHGRVLVVDGGGSLRCAILGGNPVQQAQNNGWAGIVVNGCIRDVDEINGCDIGVRALNSHPMKANKKGIGEKHVPVTIAGTRICDGEWLYADTDGILISRTELTV

SEQ ID NO: 403 - DNA, 744 bp, Oryza sativa
atggcgcaagatgatgaggacgtgggtctagctctgggcctctccctgggctccggcggccacaggcggcagagagaaagtagagacgaagcgccgtcgtcggcggcggcgtccctgctgacgctgaggctcccggcagagagctgggggcagccgcaggtggtggtgaagagggaggtggtgcgggcggaagaggaggagtacgaatacgagtacgagagggcgctctactcgtcgtcggctgcggcggcggacgacgacgagggctgcaacagccggaagaagctgaggctgagcaaggagcagtcggctctgctggaggatcgcttcaaggagcatagcactctcaaccctaagcaaaaggttgctttggcgaagcagctaaacctgaggccaaggcaagttgaggtgtggttccaaaacagaagagccaggacgaagctgaagcagacggaggtggattgcgagcttctgaagcgctgctgcgagacgctgacggaggagaaccgacgcctccatcgtgagctccagcagctcagggctctgacccactccaccgccgccggcttcttcatggccaccaccctccccgtccccgccgccacgctctccatctgcccctcctgcgagcgcctcgccaccgccgccgccgccggagcttcccccaccgccgccgccgaccgcaccaacaagcccaccgccccgcacttgttcagccctttcgccaagtccgccgcctgctag

SEQ ID NO: 404 - protein, 247 aa, Oryza sativa
MAQDDEDVGLALGLSLGSGGHRRQRESRDEAPSSAAASLLTLRLPAESWGQPQVVVKREVVRAEEEEYEYEYERALYSSSAAAADDDEGCNSRKKLRLSKEQSALLEDRFKEHSTLNPKQKVALAKQLNLRPRQVEVWFQNRRARTKLKQTEVDCELLKRCCETLTEENRRLHRELQQLRALTHSTAAGFFMATTLPVPAATLSICPSCERLATAAAAGASPTAAADRTNKPTAPHLFSPFAKSAAC

SEQ ID NO: 405 - DNA, 720 bp, Oryza sativa
atggcgagcccgcagtgctgcgcgaacccaccgacgctgaacccggccggcggggaggggaaggtggtggagagcttcggcgggatcaaggcgtacgtcgccggcgccgcggagtccaaggccgccgtcgtcctcatctccgatgtcttcgggtttgaagcgccgaacctgaggaagatagccgacaaagttgcctcgtctggatactttgttgtggtgccagatttcttacatggggatcctttagtacctgaaagtactgagaaaccgtttcaaatgtggataaaagaacatggcccggacaaagcatttgaagaggcgaaaccaattattgccgctctgaaggagaaaggagtgtctagtattggggctgtaggttattgctggggtgcaaaggtggtggtagagttagtgaaagctcatgagatccaggctgctgtgatgtgtcacccctcttttgtgactgttgatgatatgaaagaggtcaaatgcccaattgctatacttggagctgaaattgatcgtatgtccccaccagaagtggtgaagcagttcgagcaggttctttcttcaaagtcagggattggccactttgtcaagatcttccctggggttgaacatggatggactgtgagatacaagaatgatgatgcagctgctgtcaagagcgccgaggaagccctggcggacatgattgactggtttaataagaacctgaag

SEQ ID NO: 406 - protein, 240 aa, Oryza sativa
MASPQCCANPPTLNPAGGEGKVVESFGGIKAYVAGAAESKAAVVLISDVFGFEAPNLRKIADKVASSGYFVVVPDFLHGDPLVPESTEKPFQMWIKEHGPDKAFEEAKPIIAALKEKGVSSIGAVGYCWGAKVVVELVKAHEIQAAVMCHPSFVTVDDMKEVKCPIAILGAEIDRMSPPEVVKQFEQVLSSKSGIGHFVKIFPGVEHGWTVRYKNDDAAAVKSAEEALADMIDWFNKNLK

SEQ ID NO: 407 - DNA, 1302 bp, Oryza sativa
atggtttatgtacctgaaggccagttcctttcgcggataggtccaactgatttcctcaaggaccttgatgaatttgttggtgctgatgcagtccaggagtggaaaaagcttcttgatgcagttattcctatctctgcagctgcaatggctttgcctccactttccattcgaggtgatttaggtgttctctccacatctgctggtagatatgctccttctctgttgaaatcaatcctgcaaatgggacctcaaggggctcttggtgctacaaaacttctaagacctttctcagagatcgttgattcattgggcctgaaaaacccctttgttcgtaattggatcgatctcttgtgttttctacttgctggagtcaaatctgatggtgctctttctgcagaaatggtttatatgtttgcagaatggtataaaccaggatgctcgcttgagtatcctcttgagggaagcggagcaataatagatgctcttgtgcgaggaataaaaaaatttggtggcaggcttgctcttcgttcgcatgttgaaaagattttaattgagaatggtcgagcagttggtgtcaagctacaaagtggacaaattgtgcgcgcaaggaaagcagttgttagcaatgcatctatgtgggatactttggatttgctgccaccagatgctgtcccaagatcatatcaagacaaagtgaaagcaactccacaatgtgaatcatttatgcatctccacttgggttttgatgtcgagaatgccagagaggaccttggaatccatcatattgtggttaatgattggaacaaaggagttgatgctgaccagaacgttgtattgatatcagttcctactgttcttggaaatggcttagcaccgcctggaaagcacgtcctacatgcttatacaccaggaacagaacctttcagtttgtgggaaggactagataggaaaagcgccgagtatcgaaggctgaaagaagaacgctctgaggtgatgtggaaagccgtggagcttgcccttggtccaagatttagcagagaaaaatgcgatgtgaagctggttggatcaccattaacacacaagaggttcctccgaagaaatagaggaacctatggtccagccataaagctgggggaggccactttccctgggcaggcaacacctataccccagctattctgctgtggtgactcgacttttccaggcatcggtgtaccggccgtcgctgcaagtggtgcaattgtcgcaaacacgctagtctccgtgtcacaacattcagagcttcttgatgctgttggaatt

SEQ ID NO: 408 - protein, 434 aa, Oryza sativa; identical to SEQ ID NO: 392

SEQ ID NO: 409 - DNA, 1059 bp, Oryza sativa
atggcggcggcggtggtggcgaacggcgcgagcggcgactcctccaaggccgcgttcgcggagatatacagcaggctcaaggaggagatgctcgaggacccggccttcgagttcaccgacgagtcgctccagtggatcgaccgcatgctggattacaatgtgctcggaggaaagtgcaaccgcgggatctctgtcattgatagtttcaagatgttgaagggcactgatgttctgaataaggaggagacatttcttgcctgcacccttggttggtgcattgaatggcttcaagcttattttcttgtgcttgatgatattatggacaactctcaaacacgacgtggccagccttgctggtttagggtgcctcaggttgggctcattgctgtaaatgatggtattatccttcgcaaccatatttcacgaattcttcaacgccattttaaaggaaagctgtattatgttgatctcattgatttgttcaatgaggttgagtttaagactgcttcaggtcaattgttggatcttattactactcatgagggagaaaaggatctcacaaaatacaacttgacagttcaccgccgcattgttcagtacaagacagcttactactcattctatcttccggttgcatgtgctttgctgctatctggtgagaatttggataacttcggtgatgttaagaacattcttgtggaaatggggacatacttccaagttcaggatgattatctagattgttatggtgatcctgagtttattggcaagattggaacggacattgaagactacaagtgctcatggttagttgtgcaagctctcgagcgtgctgacgagaaccaaaagcacattctatttgaaaattatgggaagccagatcctgaatgtgttgcaaaagtgaaggatctgtataaagaacttaatctggaggccgtatttcatgaatacgagagggagagttacaataagctgattgccgacatcgaagcacatccgaacaaagcagttcagaatgtattgaaatccttcctgcacaagatctacaagaggcagaag

SEQ ID NO: 410 - protein, 353 aa, Oryza sativa
MAAAVVANGASGDSSKAAFAEIYSRLKEEMLEDPAFEFTDESLQWIDRMLDYNVLGGKCNRGISVIDSFKMLKGTDVLNKEETFLACTLGWCIEWLQAYFLVLDDIMDNSQTRRGQPCWFRVPQVGLIAVNDGIILRNHISRILQRHFKGKLYYVDLIDLFNEVEFKTASGQLLDLITTHEGEKDLTKYNLTVHRRIVQYKTAYYSFYLPVACALLLSGENLDNFGDVKNILVEMGTYFQVQDDYLDCYGDPEFIGKIGTDIEDYKCSWLVVQALERADENQKHILFENYGKPDPECVAKVKDLYKELNLEAVFHEYERESYNKLIADIEAHPNKAVQNVLKSFLHKIYKRQK

SEQ ID NO: 411 - DNA, 774 bp, Oryza sativa
atggcgactgcgaccgaggaggttgccgctgcggctgctgccgccggcgaggcgccgccgccgccgccgccagcggtggtagaggaggcgaaggaggctttggaggcaccgaagccggaggaggcgccgaaggctgaggagggggaggagaagaaggcggagggtgagaaggagaaggagaaggcgaagaaggagaggaaaccgagggcgaggaagccccgatcggcggggccacaccacccgccctacttcgagatgatcaaggaggcgatcatggcgctggacgggaacggcaaggcgggatcgagcccgtacgcgatcgccaagtacatgggggagcagcacatgggggttctcccggcgaactaccggaaggtgctcgccgtgcagctgcggaacttcgccgccaagggccggctcgtgaaggtgaaggcctcgttcaagctgtctgctgccgaggacaaagaaggcgacggcggcgaaggcggccaggtccaaggcggccaagggcgtcgtcggcggcgccaagagaaagaggaccccgggcccctccgccgccgccgccaaaaagcccgcgtcgtcggcggaggcgaaaaaggcggttccccccgcccgcccagcccgcgccaagagggcgaggaaggccgcccccgcgaagccgatgcagccgcccaaatccatccgctccgccatctccaagaaggccaacaaggccagcgcctgatcatcgccgccgtctcgccgcccgtcgccgccgcgcgctgtatccctgta

SEQ ID NO: 412 - protein, 258 aa, Oryza sativa
MATATEEVAAAAAAAGEAPPPPPPAVVEEAKEALEAPKPEEAPKAEEGEEKKAEGEKEKEKAKKERKPRARKPRSAGPHHPPYFEMIKEAIMALDGNGKAGSSPYAIAKYMGEQHMGVLPANYRKVLAVQLRNFAAKGRLVKVKASFKLSAAEDKEGDGGEGGQVQGGQGRRRRRQEKEDPGPLRRRRQKARVVGGGEKGGSPRPPSPRQEGEEGRPREADAAAQIHPLRHLQEGQQGQRLIIAAVSPPVAAARCIPV

SEQ ID NO: 413 - DNA, 2013 bp, Oryza sativa
atggcgctcacgacgttctccatttcgagaggaggcttcgtcggcgcgctgccgcaggaggggcatttcgctccggcggcggcggagctcagtctccgcaagctccagagcaggccacacaaggctaggcggaggtcgtcgtcgagcatctcggcgtcgctgtccacggagagggaggcggcggagtaccactcgcagcggccaccgacgccgctgctggacacggtcaactaccccatccacatgaagaacctgtccctcaaggagctccagcagctcgccgacgagctccgctccgacgtcatcttccacgtctccaagaccgggggacatctcgggtccagcctcggcgtcgtcgagctcaccgtcgcgctccactacgtgttcaacacgcctcaggacaagatcctctgggacgtcggccaccagtcgtaccctcacaagattctgaccgggcggcgcgacaagatgccgacgatgcgtcagaccaacggcttgtcgggattcaccaagcggtcggagagcgagtacgactccttcggcaccggccacagctccaccaccatctccgccgccctcgggatggcggtggggagggatctcaagggagggaagaacaacgtggtggcggtgatcggcgacggcgccatgacggccgggcaggcgtacgaggcgatgaataacgcggggtatctcgactccgatatgatcgtgattctcaacgacaacaagcaggtgtcgctgccgacggcgacgctcgacgggccggcgccgccggtgggcgcgctcagcagcgccctcagcaagctgcagtccagccgcccactcagggagctcagggaggtggcaaagggcgtgacgaagcaaatcggagggtcggtgcacgagctggcggcgaaggtggacgagtacgcccgcggcatgatcagcggctccggctcgacgctcttcgaggagctcggcctctactacatcggccccgtcgacggccacaacatcgacgacctcatcaccatcctccgcgaggtcaagagcaccaagaccacaggcccggtgctcatccacgtcgtcaccgagaaaggccgcggctacccctacgccgagcgcgccgccgacaagtaccacggcgtggcgaagttcgatccggcgacggggaagcagttcaagtcgccggcgaagacgctgtcgtacacgaactacttcgcggaggcgctcatcgccgaggcggagcaggacaacagggtcgtggccatccacgcggccatggggggaggcacggggctcaactacttcctccgccgcttcccgaaccggtgcttcgacgtcgggatcgccgagcagcacgccgtcacgttcgccgccggcctcgcctgcgagggcctcaagccgttctgcgccatctactcctccttcctgcagagaggctacgaccaggtggtgcacgacgtggacctccagaagctgccggtgaggttcgccatggacagggccgggctcgtgggcgccgacgggccgacgcactgcggcgcgttcgacgtcacctacatggcgtgcctgccgaacatggtcgtcatggccccgtccgacgaggcggagctctgccacatggtcgccaccgccgcggccatcgacgaccgcccctcctgcttccgctacccaagaggcaacggcatcggcgtcccgctaccacccaactacaaaggcgttcccctcgaggtaggcaaagggagggtactgctggagggcgagagggtggcgctgcttgggtacggttcggcggtgcagtactgcctcgccgcagcgtcgctggtggagcggcacggcctcaaggtgaccgtcgccgacgcgaggttctgcaagccgctggaccaaacgctcatcaggaggctggccagctcccacgaggtgctcctcaccgtcgaggaaggctccatcggcgggttcggctcccacgtcgcgcagttcatggccctcgacggcctcctcgacggcaaactcaagtggcggccgctc

SEQ ID NO: 414 - protein, 671 aa, Oryza sativa
MALTTFSISRGGFVGALPQEGHFAPAAAELSLRKLQSRPHKARRRSSSSISASLSTEREAAEYHSQRPPTPLLDTVNYPIHMKNLSLKELQQLADELRSDVIFHVSKTGGHLGSSLGVVELTVALHYVFNTPQDKILWDVGHQSYPHKILTGRRDKMPTMRQTNGLSGFTKRSESEYDSFGTGHSSTTISAALGMAVGRDLKGGKNNVVAVIGDGAMTAGQAYEAMNNAGYLDSDMIVILNDNKQVSLPTATLDGPAPPVGALSSALSKLQSSRPLRELREVAKGVTKQIGGSVHELAAKVDEYARGMISGSGSTLFEELGLYYIGPVDGHNIDDLITILREVKSTKTTGPVLIHVVTEKGRGYPYAERAADKYHGVAKFDPATGKQFKSPAKTLSYTNYFAEALIAEAEQDNRVVAIHAAMGGGTGLNYFLRRFPNRCFDVGIAEQHAVTFAAGLACEGLKPFCAIYSSFLQRGYDQVVHDVDLQKLPVRFAMDRAGLVGADGPTHCGAFDVTYMACLPNMVVMAPSDEAELCHMVATAAAIDDRPSCFRYPRGNGIGVPLPPNYKGVPLEVGKGRVLLEGERVALLGYGSAVQYCLAAASLVERHGLKVTVADARFCKPLDQTLIRRLASSHEVLLTVEEGSIGGFGSHVAQFMALDGLLDGKLKWRPL

SEQ ID NO: 415 - DNA, 555 bp, Musa acuminata
  misc_feature (5)..(5): n = any nucleotide
  misc_feature (8)..(8): n = any nucleotide
  misc_feature (476)..(476): n = any nucleotide
  misc_feature (538)..(538): n = any nucleotide
ccgtntcnacttggcattgctataaacatgatccactttacaatgattgccaaaaaaatggaaaagaagctttggagtggctgccgattatggccaaatccaactcttgaggttacgcaatatacttatgcacagttcttaagagctcaaggtgtcaagtttacagatatctcttgtgccaccggagggctgtgtgtttcctggtatgaggggatgacaagccgctgtaaggacctcagagcagttgtcagttgcgcaaatgaagggcgcaggtttgggtccgtttggcagcattcccaaatgatgcttgaaaccaggggatcaacttcttttggaatgtcaagtcgtcgttcctgaaacccaacagcaccaaccacttgcattgggttcattccactccatggcatcctcagcgttgcaagttcccacaggattactccaaaactatagacatcgcacttttcattggaattttncattgcgcaacacctctggtgccatccactcaggtgttcagctgtggatttcgatgataganatgtactatgcttcaag

SEQ ID NO: 416 - DNA, 581 bp, Musa acuminata
  misc_feature (469)..(469): n = any nucleotide
taacttcatattcttttcattaaatacaacaaagcatcttactaatgaatgaagcctttagaaatgcatggctacagaagcttccggcctgaatgcattgcatatatataccattatggcaaatacaaaagaataacccatcaataattctatttaatcttaggaacaacacaaaattatcagtttataccatgaccctcacagaacaagcatctctttaggacacctaagttgcgccagccgatgaagtcatcacttgaatcctgttcacaagcaaatctacttgttctcggtacatttcctttaggtcaatgatgtcagctcggagttcctccagctcttcatcacgttcacccataagttccagtgctgatgagtgcctgcgccttaaggcttccagctctgcccgtaacccaggtaaaactgctgcttctgcttgcagcttatcacactgctctgtcattttgancagttcctctgaagagaatcccgaatagattccagtgaagccaacgtgacatatatgatgcagttcaccatcttttgacgagcgctgcttcatatgcactcgtgtcatgctc

SEQ ID NO: 417 - DNA, 844 bp, Musa acuminata
  misc_feature (4)..(4): n = any nucleotide
gcanccacaaatcaaaataaacatgcaaggatcaatgtgcttacgtacacaaaacaagtgtatgatactgaccagctaccacgaagaagatagccatcgtagaatgcttgcaatgtttagatgccttcgagggtttagtttctcccgtctctctaagaagatgatacaagaattaggtcaattgaatgtgagtgatgttgagaatggaaacagaggcttggtagcagtagaatttgcagaaaatctgacaaaaaaattttgaaagatacaacaataatctcaaggacttgtgatgattagttgtcctatgatgtttgaacgagctttaacttttgcttttctcaactttggccttgatcttttgctccaagatagctttctcagtgtcaagactaaacatcctgttaagtgcatgcatgttttcaagggtctcatccagagtcctgccatccgtgccatcacatctcaagtgctgcagtgggccatgaagaagcttgttaacgataccgctgctgagctcatcaactgcttttcgcaatttctttgttagagcatcatcaccaatcttttggagacatttctcgagctcagaagcccgaattctatcagcataggatctgagcttcttgatggttggaacagtctccagagagtccctccatgcctcaaaccgtttcagttcctgtgtgattatcgattgagcttccattgccttcctcaggcgatcttctttgttggcttccacaacttccttgaggtcatcgacattatacactcgagcatgttcgacattggaaacacaagatcctacattcctgggaactgaaatatccacgaaaagtct

SEQ ID NO: 418 - DNA, 576 bp, Musa acuminata
  misc_feature (485)..(486): n = any nucleotide
ctcctttattccacatagatcgacaaaaataattgcatatttctgatcattatcgtcacatcgtgatgggtgcttcagtacattggaataagaccattaaatatacacccacaaatgtaattgataggacctactacccggtacccaaaggtcacaaccccggacaacaatcgattcgaagaaccatgaggctcacacagggaacaggactcaggccagatgctggctgtaaattggcagcaaatttccgagcccacaaatcatagtgtatgatctcctcgagtgaagggttggcaattagatcatttctatgagcatcgcatgtaagttcgactactttgaagatatctagatagctaattttctcatcgatgaacatctccacagccttctcattagctgcactaaggacacctgtcatggtgcctccagctcgccctgctgcataggcaagatccatggatgggtattttacgttatcaggnngttttgaaggttaatgaacctagcttgcaaagatcaagtcgaggccatgtgatctctgagcaagaaattctgtctggccacgacaacgtg

SEQ ID NO: 419 - DNA, 433 bp, Musa acuminata
  misc_feature (56)..(56): n = any nucleotide
  misc_feature (408)..(408): n = any nucleotide
  misc_feature (422)..(422): n = any nucleotide
  misc_feature (430)..(430): n = any nucleotide
ccctatctgtttttaaggtaaacatctcgcaaagtatgaggcacaacatatgatanatgaagcttcacaaaattttcaagtcagattgtaatcatcttacacgtttcccatcaagccatttcagagatggaagcaactcgatcgccaacacactaaatttctcattcaggactgcgtttccctttatatccaattgcgttaagcgcaacgccctaaaaagcgacgtgacttcccagtggtcacgcacctccgtattttccttctcgtatccgacattgagttgctttgcatccaaagtatgtgataatggagatgagcagaggtaccttgttgtgtcgatcgcatgagcaccgatcatgttgaaagagacatcaagtactctcaaggaactgagcagctttaggggcnccagggctgtaaanctgcttanttg

SEQ ID NO: 420 - DNA, 584 bp, Musa acuminata
cttcctccttccaccagcgtggacagcaagaacaagaaagattatttatactcgatgttacagtcaaatacatggggttaccgtaggaaactatagcggagtttcttgatttctatcttcgtgcaggcaaagccaggttagagagagaattggcgcatgagtatcaagtgttattcccaaagcccgaggaagaaagagtgggggtgggtcatgcatgcggtactgggtgcgaggagcagagtcttcccacgctagctaacatgttgccgaatggatgaagggattgaagaagcgaggagttggtggtgccgccgcgaattcttcggcaccgccgctgttgcagctgtcggcagagcctccaaccctgttgcaggaagggcacatggtgagggtggccgccggaagctgcatgtagagcggcggcgtgaacttgagggccttcagctcctgcagctccttccgcagcctccggttctcgacggtcagcgactcgcagcacctcttcaggagcttcgcggtcgacttccgtctgcttcagcttagtccttgctctcctgttctggaaccatacttccactgccgtg

SEQ ID NO: 421 - DNA, 528 bp, Musa acuminata
  misc_feature (5)..(7): n = any nucleotide
  misc_feature (10)..(10): n = any nucleotide
  misc_feature (23)..(23): n = any nucleotide
  misc_feature (172)..(172): n = any nucleotide
  misc_feature (306)..(306): n = any nucleotide
  misc_feature (419)..(419): n = any nucleotide
  misc_feature (464)..(464): n = any nucleotide
acccnnntcngacgttaaagtcnagcgaaccagacgatctttcatccaagcaacaagataggtcggggtggttttggaacagtatacaagggaactcttaggaatggagcacttgttgcaataaaggtactttctgcagaatcacgacaaggaattaaggaatttttgactngagattgattcataacaaatgttaagcatcccaaccttgttgagctaattggtagctgtgttgaaggcggcaatcgcattttggtttatgaatacttggaaaacaggtagtattgatcgtgcattactaggtangaacagcgatgcaactaagctaaattggtacatcagatcttcaatttgcctgggcatcgccaggggtctcaaatatctacatgaggagcttgaaccaccaattgtacacaganacatcaaaactagcaatattcctccttgacaggaattttgtcccnaaaattgggtgattttggtgtggctaaagcttttcctggagcaacattactcatatcagcacac

SEQ ID NO: 422 - DNA, 635 bp, Musa acuminata
  misc_feature (12)..(12): n = any nucleotide
  misc_feature (14)..(14): n = any nucleotide
  misc_feature (17)..(17): n = any nucleotide
  misc_feature (25)..(25): n = any nucleotide
  misc_feature (27)..(28): n = any nucleotide
  misc_feature (37)..(37): n = any nucleotide
  misc_feature (40)..(40): n = any nucleotide
  misc_feature (44)..(44): n = any nucleotide
  misc_feature (47)..(47): n = any nucleotide
  misc_feature (50)..(50): n = any nucleotide
  misc_feature (52)..(54): n = any nucleotide
  misc_feature (56)..(57): n = any nucleotide
  misc_feature (61)..(62): n = any nucleotide
  misc_feature (67)..(67): n = any nucleotide
  misc_feature (76)..(76): n = any nucleotide
  misc_feature (90)..(90): n = any nucleotide
  misc_feature (107)..(107): n = any nucleotide
  misc_feature (111)..(111): n = any nucleotide
  misc_feature (197)..(197): n = any nucleotide
  misc_feature (210)..(211): n = any nucleotide
  misc_feature (227)..(227): n = any nucleotide
  misc_feature (299)..(299): n = any nucleotide
  misc_feature (313)..(313): n = any nucleotide
  misc_feature (352)..(352): n = any nucleotide
  misc_feature (359)..(359): n = any nucleotide
  misc_feature (378)..(378): n = any nucleotide
  misc_feature (380)..(380): n = any nucleotide
  misc_feature (392)..(392): n = any nucleotide
  misc_feature (397)..(397): n = any nucleotide
  misc_feature (412)..(412): n = any nucleotide
  misc_feature (420)..(420): n = any nucleotide
  misc_feature (466)..(466): n = any nucleotide
  misc_feature (505)..(505): n = any nucleotide
  misc_feature (512)..(512): n = any nucleotide
  misc_feature (524)..(524): n = any nucleotide
  misc_feature (548)..(548): n = any nucleotide
  misc_feature (552)..(553): n = any nucleotide
  misc_feature (591)..(591): n = any nucleotide
  misc_feature (606)..(606): n = any nucleotide
  misc_feature (613)..(613): n = any nucleotide
  misc_feature (629)..(629): n = any nucleotide
ctggcgcatttngnggnaccacagntnntagtcatcnacncatncantgngnnnanntccnntattngcatgccanaggagattatgaantagtcctggttattagncaangacatctacaactcaataacagggttttaagtttgtagaattagcaggtggtaactttggagcaaaacaagactggatcactcggncttcttggggtcnncctcagggtcgcgaanggttccgaacatccagtccatccatatcgtgtaatgcccatagttgtgacgatacgtcgtgtgatggatggngtggtaaccggcanccatgacaggccaaaccttaccgtgaatgcagtcatggntgtttgnagtccataaagcttcgatnancagtagtagtangtgantcatgaaatgagttngcacgatnaagagagcgatcacatgcggcacggcctgcagtatcccatccaatngattgaatgccagtccagcaaatggagaaagagtgtttngcttgtngtagatgtgacngtgttacatgaaggtacttgtatnatgnngctatatcatgcagctcttctgtgcatccagtaaattnccaactcgacaagtnctaaatngatggccatataagtnagatag

SEQ ID NO: 423 - DNA, 699 bp, Musa acuminata
attaggaatttggtccatgctggtggaataagctttgtcaaatcttgtaacaggcagacaccggcccttgacacctcaacatatgatggattcttagtaaaaccaccaccagcttagcatatgataaagcagaaaaatggaaaccatgcgttacaatacttgagtacataaatttacaaatcatatcttcaaagttgatgaagtggtcgtttgggcagaatggcatctatgaacaaagatggttagttacctattacaggcttcttttcttcattaccaaaagacccatcaactttggcaaatgcttttgtcttgcttgcagattccttattcttcaacattgaaataagtggaccatcaacttgccactccaacacaactttagactctcccttgatcatcttcggatactgatctatacgagaatcttcaagaatcatttcttcaaccttcttccataacatagcatgcttcctctcccttggtcgaagtagctgatcccttagccaagaagcaactaaccaaggttcgccttcacggttcccacatctaattctcatggcattgtcttggagaatttcacatacctgctggtatagttgctcagctcgagttgtgagattctttttttgatgtatactccatgtaattttgggtaagcctacaagtaaacccaaaattgcaccataatgccaacat

SEQ ID NO: 424 - DNA, 640 bp, Musa acuminata
  misc_feature (10)..(10): n = any nucleotide
  misc_feature (603)..(603): n = any nucleotide
tgctcatgancaagatggttttacagctctaatgatgaatgccagtggcacaaggttgattgcacaatgtgtctttcatattgaatctagtggttttaattcttgacttataagatggacaagattaccaaagatatactcagttctactcttgagaacacaagtacaagaggttcagatacacaaaatggaagagaagattctcatgcaacaatggatgaactatcctttttggggcctttgtttcctggaaatgcattgcttgaaatgtccacaagtgccttgaagctatatggctcatgcatcgacagctccgacagcactttcctgttcagttggatattctccttcatcaacccatgcataaaattaccataattcaccccgtgcaaccgagcgcctgcattgatgcgctcgatccagagagaccgcatatctctctttttgttgcggcgatctctgtaggagtactgcagcgccttctccaccctctcccgagctatcctgatgcagttcttcgccctccccctgaatccctttgccagttaaaaatcttatctttgttcatcgtggcccttcctactactatacttctgtatcaanctcctccagttgacgaagtggcgctcgaggcggcggc

SEQ ID NO: 425 - DNA, 537 bp, Musa acuminata
  misc_feature (265)..(265): n = any nucleotide
  misc_feature (506)..(506): n = any nucleotide
tgatatcattacgggcagagaaaacaacaaaaagaagctcacagtagttgattttaatgccaactaaaacgacggaacgagcgtactaactactacaagtcttagctcttcgatgcaggtattacaggacttagcaaggtcttaagaaagaaaggtatatgctgatacaacaaagacaagacttcatagtcgtggtcagcccaaggatttcaaaccgatatttctgtcctggaaattaaaatgccatcactatctgcatagagcnactcaccatcacaaatcctagtccctgcgatattcaccggtacgtgcttctctccatatcctttcttgtttgccttcatcggatgagaacccaaagctcttacaccgatatcacatccattgatctcatcaacatccctaatgcaaccattaacgatgataccagcccacccattgttttgagcctgttgaactgggttaccacccaaaattgcacaacgcatgcttccggccaccatcgncaaccaaaactctaccgttaactttctcctt

SEQ ID NO: 426 - DNA, 688 bp, Musa acuminata
  misc_feature (14)..(14): n = any nucleotide
  misc_feature (655)..(655): n = any nucleotide
tagaacttgaatantatggtaaacacaccaaaagaaggaagaacatgaataatagaaccttcatgaataatagaaccttgaataagaacatggtaaacacaccacaagcctgaagaggtcatattacaagaagtaggagaaaaaacccacaaggaaaccaaagagataaacatccaatgcagcttcttctcatgaggtacctcagatcgtttgttcgatatcagggaagccatttgaggtactttttgagttttatttaggaggcagacttagataaatctttggtggatctgttgtatttcatgtgactcttcacgagctgtccagctgcaagagccgagaggagggagagctccccggctagaacagcgcctgccacgacggacgccaggcgtctcgcgtttgccccaggagtgtccaagcttgcacccttcacaccaagtaggtccaagcaggcagactgggaggccagctgagtcccaccaccaactgtgccaacctcaatggatggcatggtcacagagacgtgaagatcctttccatcattgacagcttccatcatggtgatacaatgagaactctccacattctgagctggatcttggccggtggctatgtagatggcagacactatgttgctggcatgagcattgancctccaagagatccagcaaccgcagagccagca

SEQ ID NO: 427 - DNA, 515 bp, Musa acuminata
  misc_feature (9)..(9): n = any nucleotide
  misc_feature (492)..(492): n = any nucleotide
  misc_feature (509)..(509): n = any nucleotide
ctactttcnctgagaattattattggataatgatgtagttgacctactttgactgagaattattattggatatgccggccgttccttcagcaagtagtcgtcttcctccaccatggcatcagcttccacgcccttagcgtcctctatccctcgcagtgcctcgacaacctctttcatggtaggccgcatgtcgccgtccgcttgcaagcagctgaacgctacttcggccaacctgtcttatcatctcgcagttcgactgacaccacagattcggatcgaccagctgatccagctcgtcgttttggatcttggcgatggccatgtcagcgagattgatctcgtgccgccgcctgctgatgtcgacggccggcttcgacgctatgatctccaccaacaccaccccgaagctgtagacgtcgctcttgtcggtgagctggtagcaccgatggtactcggggtcgacgtagccgggcgtgccctgtggcgcggtanatacgtgggtggcgttnacgggg

SEQ ID NO: 428 - DNA, 367 bp, Musa acuminata
caagctcttaggccaatagagagtcagtatgtttttcactctgctgattcttcaaagtagatttttcatgactgtcactgccatctcgtgcttcttcttcccttgaatcaagtctaccatcctcgaaatcagatagtgttctctcatccttttcgctttctttagctccagctggccccttctctctgtcccttgttcttgatctatctcgatcagcttccaagcttctatcaatttccttctgcctaaaattctccttagtcttctcccgttccttatccctcactctatccttttctttctccttctctttttctcgatctttagttttctccctttccctctccctgtccttcaccatgtcgcg

SEQ ID NO: 429 - DNA, 425 bp, Musa acuminata
  misc_feature (87)..(87): n = any nucleotide
  misc_feature (162)..(163): n = any nucleotide
  misc_feature (165)..(165): n = any nucleotide
  misc_feature (168)..(168): n = any nucleotide
  misc_feature (179)..(179): n = any nucleotide
  misc_feature (209)..(209): n = any nucleotide
  misc_feature (211)..(211): n = any nucleotide
  misc_feature (308)..(308): n = any nucleotide
  misc_feature (378)..(378): n = any nucleotide
  misc_feature (417)..(417): n = any nucleotide
ttggaatctatccaccactatttggtgtacttcttgtttactctcttggtggcacagctataagcgtctttcttgggaagggtttantcactctgaatttcatgcaagagaagaaagaagcagatttccgttatgggacttgtcagagttagggaaaatgcnngnaanccaattgcctnctatggtggtgaggggaatgaaatgcaaantnggctgcagcggttttagaaggcgcttttggaaaatttaactgaactgttgatttcatctcgtaatctagagttcttcaccaatgcgataccgttatngaatttcaaattcttcccgctgctgttgttgctcctatgtacttctcaggaaaaatcgagtttggagtantcaatcaatctgtttctgctttcaagccatattcttagngatttttc

SEQ ID NO: 430 - DNA, 587 bp, Musa acuminata
aaagtcgacgattacgctcgaggaatgatcggtggatcagggtcgaccttgttcgaagagctcggtctctactacatcggtcctgtcgatgggcacaacatagatgacctggtcgccattctcaaggacgtgaagagcaccaagacgacaggccctgttctcatccatgtcgtgaccgagaagggacgagggtatccctacgccgagaaagctgcagacaagtatcatggtgtcgccaaattcgatccagcgacagggaagcaattcaaatcgggctccaagacgcagtcttacacgaactacttcgcggaggcgttgattgccgaggcggaggtggacgaaggcatcgtcgcgatccacgcggccatgggaggaggaacagggctcaactacttccttcgctgctacccgacgaggtgcttcgacgtggggatcgcggacagcacgcggtcacgtttgcggcagggctcgcctgcgaaggcctcaagccattctgcgcgatctactcctcgttcctgcagcgggcttacgaccaggtgatacacgacgtggacttgcagaagctgccggtgaagttccgatggatc

SEQ ID NO: 431 - DNA, 663 bp, Musa acuminata
  misc_feature (7)..(8): n = any nucleotide
  misc_feature (106)..(106): n = any nucleotide
  misc_feature (224)..(224): n = any nucleotide
  misc_feature (492)..(492): n = any nucleotide
  misc_feature (569)..(569): n = any nucleotide
  misc_feature (590)..(590): n = any nucleotide
  misc_feature (606)..(607): n = any nucleotide
  misc_feature (615)..(615): n = any nucleotide
  misc_feature (649)..(649): n = any nucleotide
tgcatcnnttgttttcattatgctttacacaagttaagacatccatggagaacagcagatggcttcatttaacaccatattttactatattaaacctatacacatnaaaatttttatggtctccttgatgtcaaggacttcgtaacacaatccacgataccttcacagccggcttcctccgagaccgtgcattcagaagcatcctccataggtttcggatccgngtgaggggagcgcagatttccatgggtttggcaggttgccatcgttttgcaatgctcggcctcatcgtcacgaatgttcatgaaaacatcataaagattttctatcctcggcctcctagatttaggagttctagcagtttggaattcgtcaaacaagtacaaatcctcattcatgtagtaattgatagctgcctctggggcagggaacttctttaactcttcttcatggagctttataaacttgtcataagtggagtatgcatgtcgntcaacacattctgaaaaatggtatgccattctggggctcatgatgtacattccaactgtcatgaagtagtaaaaagnatgcaacaaactgagcaagangacgatctaagccagnnagcatttncccctagttcctccatggataagtagatggtggnactcattccagctt

SEQ ID NO: 432 - DNA, 576 bp, Musa acuminata
catataatgatattaaaagggattctattacattggaaatacgatattttttgggcttttttttttcccctaatatgattttgtcgtagcctattagcagaccggaagcagtcgaatattaagctccggccctgggtgccttggcgggcggcacgaagaactcggccaccgtccggcgctggatcttccccgtcgccgtcttcggcagcgagtccgttatgaacaccctcttcggcaccttgaacgccgccaggttcttccggcagtgcctcagcacatccgcctcgtcgatctccgcgtcctccttcggtatcaccgcgcagtttatctcttccccgtacttgtcgtccggcacgccgaacgccaccgcctgcgcgatgtcggaatgctccagcagcaccgcgtccacctctatcggagagatcttctcgcctccgcggttgatgagctccttgatgcgaccgacgaggtggaggtagccatcgctgtccaggaagccgacgtcgccggtgtggaaccatccgaagcaaaggccgcttgttcgcctccggattgttcttgtagcccgggtcacgt

SEQ ID NO: 433 - DNA, 573 bp, Musa acuminata
  misc_feature (467)..(467): n = any nucleotide
ttgcccctatagcaaaatttccgatccacccattctgcttgagcttaaggggtggagctgaatatatataagaaagaagggatccacctacagctagataaaatatgaccggagacttgtgccctgcccacacatctaataagcctgccaatccaaggccacctagaagcagcaaccagatttgggttataacctcgccctcagatatagctcctgaaggaataggacgatacggctcattaattgcatcgatttctctgtcataccagtcattaagtgtctgtgtatatccagttagacatggtccagacatcatcatacagacaatagctttagatacatcttcaatattccagtgaaaatttccagaagcagcagctccgcaaaccactccccacactaacggaggccaagtgactggttttgtaagttgaagacgtatcttccatttattcgtctcttgtgcnttacccttgataccaagaagctgattgaagctcgaacctcccgcgtcgctgctcgctggcggcttctcgggcgcccagctttaacttcattggatccgtctctgcc

SEQ ID NO: 434 - DNA, 654 bp, Musa acuminata
  misc_feature (627)..(627): n = any nucleotide
  misc_feature (634)..(634): n = any nucleotide
gtattgtggcaataagatacattttcaaagtaataacactgattgaacaacatccatttttccaatgtcaaaactcttgatgataattatcccagttggtggaattctttgtttccaaggtgtttgctgtacatggatgcaaagtaatgatagggcaccgggaagagcaatcaaatactaccctggttttttcctttaggatcaggacaggggattataccccatttcctgcgcacatcctccaggttctcgtgaaagtgcttctcgtagtacacagacatcagatctgtgcacgccacacctgccttaacagcccaaggaagatagtgttggaaaaagagtgccctttgctttctgctgaaccgtaatgagcctccgatgaccgacaaggcacacatcggaacaaacatttgctcaaactcgatcaccttaagagcagactcacctatcaagtttgtgggaaggccaaatagcacatgccagaagtcatgcacctcacgagcacgtgtggccacgtatgccagtcatctgtgtccatgaatcgaactggtgggcggtcatctggggagaagttcttgatcccatgaatgtgcataagtgagccaaatgtgctttcggtaagtccangcatgtncattgtgcgataccacatgt

SEQ ID NO: 435 - DNA, 623 bp, Musa acuminata
  misc_feature (7)..(7): n = any nucleotide
  misc_feature (569)..(570): n = any nucleotide
ggagganctcgatttcagttgcagatccatgaacaggacaggactgttcgttgtacaaaatgcatgaaacgctctcctgctgaggaatctattacactcgatctgcacatggctctaaatatttcaagttgcaaccgtatgaatgcaactgagatcaaactcctctctactagaaactgagatccttccgcagatgaatgcaactcctgacctgcctttcttccacaaatagtgaacacacaagctttgtaatcaccatatcaacaaaagtcttacttacgccgcctggtctgaatggcctctgaactgtcttttctcatcatagttacaaactcgtcgtaattaattcttccatccttgtctgtatcaacttctgcaattatctcttttattgttttctcatcacccatgttatacttcttgagagcttgctctaattcctcaacagtgatgtacccgctcttgtcttcatcaaaatactcgaatgccttgtacaagtgatcttctctttccactctgttcatgtgcattgtagctgtataaattcaatataatcaatgcttccattnnatctacatcagctgcctccatcagctgcctaacttcagttagaatcttgatgc

SEQ ID NO: 436 - DNA, 618 bp, Musa acuminata
  misc_feature (607)..(609): n = any nucleotide
aagtagagagtccattattctttgtaatttgaagcctacttttacatatgactgacacattatgccaaaatcttaagtaacaagatttttcacgctgaactaactgcaggacgaaattactgtgtttgagcaactcgaaggacttacaattcatctttgacatccgcaccgccactgttctcaccagcagaagcagatccatcagaggcctcagttttcaggactgatgccggcctctggagcttgaatgggatcgatgcatgcttcttaatgaaattgtagaacgccttcactgttctatctgcatccactgtgatcggttcaaaactcttgtttccagctggaaagaaaagaagtgtagggaaaccatcagccttggcccgagggtgctcatttgtggtaccatccattttcgctatcaccagagactcaatgccccgaagatgtttggcaagcttgttgtatgttggctctaatgcttggcaatgcccacaccatggtgcatatatctcaagaagaacatcctttgattcatccaaaacaatctcatcaaaattatttccaacaatgattttcacatccccatcatttgtctcaggtaacggannngaaatgtag

SEQ ID NO: 437 - DNA, 638 bp, Musa acuminata
  misc_feature (8)..(8): n = any nucleotide
  misc_feature (11)..(11): n = any nucleotide
  misc_feature (14)..(14): n = any nucleotide
  misc_feature (611)..(611): n = any nucleotide
tattgccnganatngatgaaagtaggacatacatatgaaatcaagattaccgtttacagttgaatcaatggaaaaatgtgtgtgtgtgtatatatatcaggccattcttcctgtttacaattaattgtgccgcaattgctggtattccggtgattggtatcttgcatctccagctacaactgtaggttgcagtgcccaccattcaaacagtgacagtcaaatcccaatggcatccagaagatcagagtgctgcgatacagaaactaaagtattggcaactatggcaccactagctgccaccgctgggacacctatccccggaaatgttgagtcaccacaacaaaagagctgcggaataggcgtcgaatggccagggaaagtggcttctccagcttttatagctggtccatacgttcctctgttcctcctgaggaatctctggtgagtcaatggcgttccaactaattttacatcacatttctcacggctaaatccagggccaagagcacgctccactgctctccacatcacctctgatctctcttcctttagttttcgatattccatgcttctacggtcgagcccttcccacaagctatagggttctgtancagggagtataagcatgcaagacatgc

SEQ ID NO: 438 - DNA, 795 bp, Musa acuminata
  misc_feature (5)..(6): n = any nucleotide
  misc_feature (9)..(10): n = any nucleotide
  misc_feature (15)..(15): n = any nucleotide
  misc_feature (18)..(18): n = any nucleotide
  misc_feature (63)..(63): n = any nucleotide
  misc_feature (68)..(68): n = any nucleotide
  misc_feature (75)..(75): n = any nucleotide
  misc_feature (79)..(80): n = any nucleotide
  misc_feature (88)..(88): n = any nucleotide
  misc_feature (90)..(90): n = any nucleotide
  misc_feature (92)..(94): n = any nucleotide
  misc_feature (97)..(99): n = any nucleotide
  misc_feature (101)..(102): n = any nucleotide
  misc_feature (104)..(106): n = any nucleotide
  misc_feature (110)..(110): n = any nucleotide
  misc_feature (112)..(113): n = any nucleotide
  misc_feature (167)..(167): n = any nucleotide
  misc_feature (198)..(198): n = any nucleotide
gtcannctnnttccnacngatttatttgcaagataaaaatagtgtcctagatcttttacatgnggctncgaacanaaanntaggaacnancnnnagnnnanntnnnaagncnnatcctggaccaagggaacttgaactgcaacatgcaaagataacacagtcgtttngctttccagttcaaaattaataagaaacttncattcggtggtagcaaaacaaaaccatagcatgcataaggttgttacattggaccaatgttcttcaaatcagattaggcctgtagattgagctgtcatcttctctttcatgctggaggagttgctctcactgtagcttgatgtgcaccaagaagggataatacttcagactacagtgcatgatcctggaaaccatgactcttcctgtacagctggtccagtatatctgcctgaacgcatgtgaagatcatctggagcttctatagcctcaagccatgcatattcatcttcgttctcattcactacaattctactcacaggtgtgaaagtggagtatgggtaatcatggtaataggtacaacaccgtcctgcttcctcagaatatggtggagccaagacatcaagaacagcacaagaagtcactgcagtgaaacaatgcaagttgccaccacttcttgggaatagaacagtggttggacatggtgctgtcagaacagtgtccatgtgtaattttgccaatgttacaggaaagtcatctggcttgttacttcgcatcgagcagggcaggttctatccaatcatatgacttcacatggca

SEQ ID NO: 439 - DNA, 505 bp, Musa acuminata
  misc_feature (6)..(6): n = any nucleotide
  misc_feature (13)..(15): n = any nucleotide
  misc_feature (24)..(24): n = any nucleotide
  misc_feature (36)..(36): n = any nucleotide
  misc_feature (50)..(50): n = any nucleotide
  misc_feature (495)..(496): n = any nucleotide
ctacanacaccannnacatacggngcttctcagatnagatcttaaaatanttgcaaactactgatgtgtgcaataactcaatgattaacacaaagaaaaaggtgttccacataattgcaccataagaaggctcagatatgcagtagatttagaacaaccagtaggagagacataccggtgcagtgggcacgacttcaaactgtcaactccatcctcgaaacaagaataccatcagtatcagcataaagccactcaccatcaaatatccttgttccggcaaggttgatcgcgacgtgtttctcacctattcccttcttgttagccttcattgggtggggagccaatgctcgtacaccgatatcacaaccattgatctcgtcgacatccctgatgcagccattgacaattatgccagcccacccgttgttctgagcttgttggacaggattacctcccagtatggcgcaggccatggcttgctccttccaatcggannaaccaagac

SEQ ID NO: 440 - DNA, 535 bp, Musa acuminata
  misc_feature (8)..(8): n = any nucleotide
  misc_feature (17)..(17): n = any nucleotide
tggtatanacttgaaanagcatagtcaaacatgggcaaccctaagagttaaacaagttcaactacaacagacagtacagcagcaaatagccaagcacacaagtggtcacacacaaaaagttcatcgggactcgaagaggttatgctgattctgaaatcctcaagttggtcagaggttaaacttcttctgcataggccggttcgaggatctcggcctcagcttcctgcacctccttctccgtcttcttccccttcttggacttgtagtagacactcataaaggtcccgaccgccccatatttcttgcggcagtgctcgtattgcgatccatcaaacatccgccagaagttcttctcggtgagctcggagacggcgtactgtggctggaacccgtggttctggatcaaccattcctcgaggttgcggacagcttcggcaccgttgaactcctcaccgcggagaacgggacctggcgcatagtacaccccgatgtccgtgaacatttgggcatagctcgtgtctccctgtcggtatga

SEQ ID NO: 441 - DNA, 452 bp, Musa acuminata
aactccacacatcttttatcagaagtccataaagggtatctaaaaagttagggctagcacatcattacacataaaaacatgagaatacattagaaaaggagatactaaaccaagttgaacgatgtcattggtgcaacagctttatatggcattatcgacagatgtatctcacttatttcccgatataagcttacaacttacgtgatatcaacaaaggtaagaacctgtccccaatgttcatcatgatcctgtgcccaagtctgaattcacaaggatgagttgtgcttgagtagcacatagccagagaggacagctcggtttcggtccttcaccttagtctgatatatgactcttgagccttcaagccacatctctgtcactaaagtttctccaggatatacatgtgaaaaaaaaaggggcggccgctctagaggggtccaagcttacgtacg

SEQ ID NO: 442 - DNA, 452 bp, Musa acuminata
  misc_feature (11)..(11): n = any nucleotide
  misc_feature (13)..(13): n = any nucleotide
  misc_feature (26)..(26): n = any nucleotide
  misc_feature (67)..(67): n = any nucleotide
ttataactcananagaaacgaaggcntccagtatacttaacgcagatattgagaaaacggatgcaangtttgtagcatgtacacagcattcactctacgacagtagaactgaccatacacgattataatgagatggatgaaaccacgcagtgcgattagttgaagactacagacagtggtcagtaacgattagaacacatacagcttgcaaagccatgtgattgcttagaagtctaatgcaaaccctcaggtcttctcgggtgttggcatccattaactatgcctctacttgtcgttgaagttgctcctccgtgacaaagaaggcatggaatccatagggaactctggtccgaagctccacaaccgcaacaggatcagcagacatcgtcttcgcgtctattacattgacttcagatttccctgtgttctcatcgtgtacaaagaatattagg

SEQ ID NO: 443 - DNA, 797 bp, Musa acuminata
  misc_feature (27)..(27): n = any nucleotide
  misc_feature (70)..(71): n = any nucleotide
  misc_feature (722)..(722): n = any nucleotide
ctgagcaacttgtttatatcttgaccncaccatatgcagagaaatagctagtgcaagaagttcgtcaatnntcacataaaataaaagcatcgattcttcccaaagcaaaaagagagaaagagagaggaacgatccaaaaaggatcatactaagatattccggcaaaacccaagaattatagagggagcatctctcacaaagtagttccaatgaccatcatgttctcttgtaagcaaactcactttgggagtccagtagtgggacttagcagagctagactttcgtcagtaagcacccttggtccactcccaagcctggtgcagatgaaatagctgaccttgccggggaacttttgagatggatacttgtccttgctctcaggtggtggtggcagggcttcaaaatctttcatcgactgtagaccagcttcatgcagaattgatttgtctcctattacataactagtcaattcattgtctgctggtggagggaagcagaatagcaggcgctgaagcagaagaccagcggattttctgtttggtgcaatcaagacggcgttgggccccgcgtcgaaagtgtaggctgcctgtggtgttccttcagacctgttccatctttcaacaagactgattatcctgtgtgatgtatcattcatgtagaatataggggggctagtatccaagcaaacagcatgaaactgattactgtctgcacaagtcaancctagcaaaagatgcaaaatcacgatttctgatagcttcttccatctgcaaatacgacctgggacaacagtctgg

SEQ ID NO: 444 - DNA, 632 bp, Musa acuminata
gtatttaagcacatgaaatcgagacaaacatttaaatccgcaagctgaagaagaataacatgcaaaagtacaagcataaagcaagcatctaccactacacaagaagacatcaccgcgagaagcttagcagctacccctatcgactatgctctgcttcagcacgccctcagcacttgtcttctccgcatgaatccttctcagggctctctacccgtggcttgctccaaccagcacaaacaagaaaggctcccaagttcatggtgctcagtcccgcaagcagcccatagaagcaatccaacctcccgtagttgatgttgtcggcaagccacccctgtccacccttgccgccggtaacacccttcacgaacgacaccaagaagctgctcaggaagaagccgagggatagcgtcgttaggaagagcccggtgctcatcgtcttcatccccttcggcgaccgggtgatgaagaaatctagctgcccggtgtatatgaatgcttctccggcacccacgaacaggaactgcggtatcaacgtgaaaacactgatgggcagcgtggtggtgccgctggcggcttcccgggccaccgagagccgtttcacttccgtcagtgctgcaggggcatccccatga

SEQ ID NO: 445 - DNA, 319 bp, Musa acuminata
  misc_feature (3)..(3): n = any nucleotide
ganagaaaacattatttccacgcctttccgatgcgttcagtatttattgcatacggacgaagtggaggaagagcagtaggaagcggtcacctgaatctgatcgccgacgttcacaatgaaggcatcggggactggctgcaccgtgatccaggaatcgttcttccggacctgaaggccggtgacgtgatcgtcgacgaggaggacggtcatgccgccggggtcggagtgcgccgagagcccgagcgtgagtccggctgcgggcacctggggtagaagttgaccctcatgcagaccccttcgtcgtcgaatgccaccggca

SEQ ID NO: 446 - DNA, 604 bp, Musa acuminata
  misc_feature (5)..(5): n = any nucleotide
  misc_feature (10)..(11): n = any nucleotide
  misc_feature (15)..(15): n = any nucleotide
  misc_feature (131)..(131): n = any nucleotide
  misc_feature (159)..(159): n = any nucleotide
  misc_feature (247)..(247): n = any nucleotide
  misc_feature (574)..(574): n = any nucleotide
  misc_feature (580)..(580): n = any nucleotide
aagcngccgnngatntcttcttttcatattcaatgaaagatgattacacggtaaataattatgcatcatgtctctccattgtacatttctacgtcaaaaatacgtacgtctctctgcacatcaaactcganatttcctgtgttcctcagattgcaagcntcaacaactttttagccgctaaggttggtggagttgtcggaaagcttggccctcctgctgatctccttctccagctcctccaagccgnccacttcctccagttccttgggtcccaagaagagcccatacggcaccccgtcgaacttgtccatgtggtgaatcttgtgggcggcggccacccggcggaagtaggggacgttggcgatggggcccacggggaacctgcggtggaccagcccgtcgtggacgaacatgtaggccatcccgaacagcgtgatcccgaggccggcgccgaagcagaggccggggaggaggccgcggttgaggaagccgtagccatgagggagatggcggggacggcgttgatgatggcgaagacgtcgttgagctcgaaggggccgtcgcccggccggtngtgaanactcgtgcatgttccacaacgatg

SEQ ID NO: 447 - DNA, 600 bp, Musa acuminata
  misc_feature (5)..(7): n = any nucleotide
  misc_feature (462)..(462): n = any nucleotide
  misc_feature (550)..(550): n = any nucleotide
tttcnnnattcagaataactctctgcctcgtcaattccatcttcagacatggatgtcaagcttggtgggttgctttcgttttggcttaaattggtatcagatgagatgtcaaaagttggatttgatgatatcttctgttggttcagggtcagcatctgtgcttcaacgcttcgaagcttgcttgcagttttagcatacatgtttctcgaagcctgtaactcactgttacgttttgacaaagcctcttttaacatctttgtttcttcctcaattgttaataaacgtgctgtaagaaactcattctccttgtgcatagtgtggatgctttcagaggcaaaatcagcagcaggtgttgaaatgtaaggagggctaggattcttggcaggtgatcgtcgtaatctagtctccccatgatcacggcctaaattttcaacttctagtttcatttgtgctaatgcagcnggcccaggcagctttttcctaacaagaccacgcaatctttggcattcagcttctagttttgacattttctttacatcctccaaatgcngtctgttcgctggcatcagcagatttatgctcatatttttctcttcactc

SEQ ID NO: 448 - DNA, 548 bp, Musa acuminata
cacaagacacagaagcatgatttgcaaaaagaataacataatgcaaggcaaatcaaggggaaattacaggacaaactactctatcgcaccatcattgatcaaaatatatccttgtgagactatttctccctcttgtagatcttctgcaggaaagacttcagtacaccctgaactgctttgcttggctgggcctcaattgaagatatcagttgttcataactgatccgctcgtactcggcaaatacattctggagatcgagatctttataaatactcttcacttttgcaacacaagttggatcagactttccatagatctccgacaaagttttcatctgattctcattagcgcgttgtagggcttgcactacaagccaagaacatttaaaatcttcaatgtcggttccaatcttaccaatcacttcaggatcaccaaaacaatctaggaaatcatcctgcacttggaagtatgtacccatttcaacaagaatgttttcacatcaacaaaggtgtcaaatttcactgccattagcagtgacatgctactg

SEQ ID NO: 449 - DNA, 532 bp, Musa acuminata
  misc_feature (3)..(5): n = any nucleotide
  misc_feature (7)..(7): n = any nucleotide
  misc_feature (15)..(15): n = any nucleotide
  misc_feature (42)..(42): n = any nucleotide
  misc_feature (233)..(233): n = any nucleotide
  misc_feature (292)..(292): n = any nucleotide
  misc_feature (353)..(353): n = any nucleotide
  misc_feature (493)..(493): n = any nucleotide
  misc_feature (508)..(508): n = any nucleotide
  misc_feature (529)..(529): n = any nucleotide
ttnnncncgtaccanaattcccacttttttttctccagttgnaagagatccgtgcttgttaggttgatcgcgagatgtcgaagtcaggggcgttggatcttgctacaggagtaggagggaagatcaagaaggaagatgtgcagtctgctgtcgagcagtatgaaaaatatcatgtttgttttggagggggtgaggaaacaagaaaagcaaactacagtgatatggtaaataantattatgatcttgccacaagcttctatgaatttggttggggagaatcatttcactttgntcccagatggaaaggggagtcattgcgtgaaagcattaagcggcatgaacactttcttgcnttgcaactagggttgaaacctggaatgaaggtgttggatgttggttgtggaattggtggaccctacgagaaattgccagatttagctcaacatcaattactggattaaacaacaatgagtaccagatttcaaggggaganactcaaccgtgtagngggatcgtgtgagtcatgcanctt

SEQ ID NO: 450 - DNA, 523 bp, Musa acuminata
  misc_feature (483)..(483): n = any nucleotide
  misc_feature (492)..(492): n = any nucleotide
agatttgactcgttttccaaaccacaataagtttcagcatgatcagaatggccatacagttctccggaaggatagattacatactgctctgatgacctacatggactgctactgacactacaactaccaacagaggatgaagtactttctgcatcactgggtcctgaaatcctgacaagatgattttgcttatctgaacttggtattccccttcctggatccactttagaactggttctgttggtaaagggaggaatgcacatattttccatctagcactttttcagaggaagcaacatcgtctaacttttccataaaatgtattgtatgctcagaagttattccttgattcctcccatccttcttaattgccctcatctttcttctaccataattgcacagctcagcgggaaaagaaatatcaactgccttttcttcgtgcctctacaaaacctccattcagttttcttagaaaaatcatgntttcaatangaaaacaggtcttttgagcagattatcaatc

SEQ ID NO: 451 - DNA, 440 bp, Musa acuminata
  misc_feature (7)..(7): n = any nucleotide
  misc_feature (24)..(24): n = any nucleotide
  misc_feature (80)..(80): n = any nucleotide
  misc_feature (86)..(86): n = any nucleotide
  misc_feature (134)..(134): n = any nucleotide
  misc_feature (172)..(172): n = any nucleotide
  misc_feature (276)..(276): n = any nucleotide
  misc_feature (349)..(349): n = any nucleotide
  misc_feature (394)..(394): n = any nucleotide
ggtgttnctagttgaatttctgcngagaagatgccaccgacacaattccttgacggatatcaaactcactcttgaaaagnatgggngatcgttgcgagctcctttgcaaggaccctaacaattttagtccagantgaatggcaaccactccaccaactagattctcggattnccaccttctgaaagcctgcatcgacaatcatccgaccaaatgcatcctgattaggaaatcggccggatgctctcgaccaagtattggtaagactctctatcacnagcgacaagctctccaacagcaggaatgaccgaaaaggaatagtaatcatagagctgtttaaagacaggaaantccacatggctcaactcaaggcataagaatctgccaccccgcttnaggcctctataagcttccgcaagagctttcctcaatgtgtgtcaca

SEQ ID NO: 452 - DNA, 434 bp, Musa acuminata
  misc_feature (97)..(97): n = any nucleotide
  misc_feature (226)..(226): n = any nucleotide
ttaaagaggaacaatacctcttgcctaaacagtacatgcacattctctttcttaaagtcaggttggaagatttatgctaaaatataggaaaaatacnatagtacatgaaggatgtttggtaggccttcttcccctgaagatgacaaatgcatacttgaattgtcctgcaatcacacagttaattcatcccacaaccatggctcaccagacaaaactactacaaaangttctgtaaaatataagttggtctataaagaggaaatatacatatgacgaaagacttgtaaattgattacagacttggttcacaacaatgaacgcatcaatcctgcatgagacacgagctctaagacaagtgcagaagcccccccaccaccattgcaaacaccagcaactccaattgtgccattctatgtctcagaacccccagcaag

SEQ ID NO: 453 - DNA, 537 bp, Musa acuminata
  misc_feature (309)..(309): n = any nucleotide
  misc_feature (383)..(383): n = any nucleotide
tctatattagatagatagcgagagaggaggttgattctctgtacatgagaaggctttagaaacaagggaacatttttgttactaaatttgggtagaaaagcaagagggaagaggaaggtcatgtacgccagtccgcctttgaccgactaaaaaagctgtgagcaggaaagccagcagtccgcatgcgtcggcgagccatcagtagcctcctcctacttctcgaactgcccgagcctgttgtcccccagccttgatttataggcagccttcttgtactccgcccatgtgaactccttgtacttgctctgntccccctctcccatcagctgtgacaatggtgcaatcttccctgcgggaggtggcccaaagaagtagatcatcgngaccctggacttggaaccgttggccaacaccctgtgcctcacactcttgaacctcccgttcgtcagaacctgcaggcagtcaccgacgacgatgaagaaggattcctggtcgggtgggaccgagacccagctaccattctttcagtgatatctg

SEQ ID NO: 454 - DNA, 592 bp, Musa acuminata
aagaaccatttgcagcaattaattgccactgaatgagaattacagcaaatgcctgcttgcaacaacatcatctctagttcactagcatgcagtcataagaacctctcctgtggtcatctctagttcactagcatgcagtcataagaacctctcctgtggtctcttccagtttacaaggtgagcttttccatctccctcctcaaggcggtggctctcacgaggctgccgatgggtgttcacggcgagcttgaggtcgtcgaggggggttccccggcacgaccttcttgtacaggtagctgtcgaaggtcatcttctgcacgtactcgtcggcgcacatctccacgaacgcctccctggccgcgttggagcggtagaacagcttctgcagcacgtcgagcaccttgtacgtcggccagtacatcttgtcgaacttctccaggtacttcctcaggtcgccctcgtcgatcatgcggctgccgttctcagaaccctcgacgatcggttccgcgcacatccgcccgctcttcgccgcgaagtagatcccctcgccggagcacttggttacgtaaccagctgcgtcacctacaagtgc

SEQ ID NO: 455 - DNA, 608 bp, Musa acuminata
  misc_feature (576)..(576): n = any nucleotide
gaaaaatgttagtatctgatcccttttgccacttcaaaaaagtgtgcaacattttcctcgggggttcccactacaatgccatgaccgaggttcaatatatgcttgctgctacctgcctttcttactgtatcattaattcgcttggttataaactccgttgatccaaaaagaacaccagggtcgacatttccctggactgcgatatcggatcccagtcttctcctaccttcagccatgtctactgtccagtccaagctgacaacatcgacgcctgtcgatggaagtctctcgagcaagcctcctgaaccacttgcataaagaatcaatggtagatcagggtgtgtcttcttcactgaaaccacaatttgtttcaaataaggcaaactaaattcttcaaagtcaacgggacttagttcggtcgcccaagaatcaaaaatctggacagcttgtgccccattgtcagcttgatacttgatgtactgggccatagaatttgtaaatttctgtaacagtgaatgtagaacctgtggttgagaaaaagccagcctctttatcttcgtgaaatgcttagatgancaccttcaacgacataagatgcagggtgaatg

SEQ ID NO: 456 - DNA, 603 bp, Musa acuminata
attgattaaggataaaaaacacataacgagtgtaaagttaaactatcatatttatctataccataatcttctatcactcttaattggtttttacctactacaccaattttttttcatcaaaaacaaaaacccctccaccctttaccaatcaccccccggctcaacacttggctgcatgccagctctgtgcgcatttggcatccaccaccaggtcaacctcgaggaagttcgtgccgtaaaagggcttggacatgcactcgacgacgatggccttggcgagctccgctgactccgttggtccttccagtattacttcatcatgcacctgcaatagcaatctccatccaagctccttcagacgaatattcctatctatctcaagcattgcacacatggcaacatctgctgcacttccctgtactggagtattaatagctgcttgtaaaatgtgacccatctgagcattgcttatttttccaccaaaggaaaatgctgcggtcgtccaagcaacgtcctgacgcatttgcttttaattgcttcctttttgcgttcttttgccagcgtagaacttcttttcttcttcgtaccaaagagaattgtatc

SEQ ID NO: 457 - DNA, 844 bp, Musa acuminata
  misc_feature (412)..(412): n = any nucleotide
  misc_feature (804)..(804): n = any nucleotide
  misc_feature (810)..(810): n = any nucleotide
ctgtcggagttctcacattatccaacccaacatccaacacaaataaaaattacatgcatgacagaattgttaataagaaaatggcacagcaaagggagtcacttgaatgcaacagtagcctgcaaaggccatcctaaggaacagcttagaagaaatggaaaaacccacacaaaccaagagataacatccgatagcttcttttcatcagatttttttctttgctgttgtttcctttaaaaacctttgttcatccttagagaagccattctagatgactttcagcaggcagccttggagaaatctttgctggatctgttgtacttcatatgactcatcacaagttgaccagctgcaagagctgagaggagagacagctccccagccagaactgcaccggccacgacagtggcgnaggcgtctgggcatttgcaccaggagactccaagcttgcacccttcacaccaagtaggtccaagcaggcagcctgggaagcaagttgagtcccacctccaactgtgccaacctcaatggatggcatggtcacagagatgtgaagatcctttccatcattcacagcttccatcatggtgatacagtgtgaactctccacattctgagctggatcttggccagtggcgatgtagatggcagacacaacgttgcttgcttgagcattgaagcccccaagagatccagctatggctgagccagcaaggttcttgatcgtgttgagttccactaatgcaggtatattggtcttcaaaaccttccttaccacctcctccttgatgattgctcacagancaccgntttaccccgtccttcaatccaattcactgcagca

SEQ ID NO: 458 - DNA, 598 bp, Musa acuminata
  misc_feature (11)..(11): n = any nucleotide
  misc_feature (16)..(16): n = any nucleotide
aacacattaantgacnagaaatcctgaattattccaatcaaaacatagcaagagagaaaactcggttgttattagagcttgaacataatactgcaaggaagagaaactcaattgttcttagggcacaggacacggcttcgatattctccaagagcccagattggaaatatatttcgatatgctgaataactgatcatgcagtttctgttgaagacccccataatctcttgttggggaaactcgccattctccatctgcatatttattaaaacttttgctgctcgatgcaatggtttggatctctctcacactgcccagcatcaattagagttagcatagcccaaccagtattcactgcatgagttctgttgccctcaatattggtgtagaccttatcttgacatgaaaggtagctctctccccagccaccagaagccagttgtttagacaacaggaagttacatgcttttcggatgcaagagctgctctcatatgtccttccagcagcaactaatcccttcactccaaaccatatgccataggtgaagcaacaccccaagatccataccatgaaccatcagcttgctgaatctttcaa

SEQ ID NO: 459 - DNA, 446 bp, Musa acuminata
gctgacaaagattaaaattagagtacatccaaaagtctgatatacaagaagattaagccgcctagtacttggtggtaggtgtcaaatgcaaatagaatcacaaagagcaggaaatcaaggaaagttaaatctcactgtggtgaccataaattaatggctagtggccttccttgcttctaagagattccagggccttctcccgaagcttgatctcaagctgcttctcctcggactctgtttcttctgcgtcagctatgtgaggacccttcctagtcgcagcttcatcatctgatttgccagcatcactgtgctctttctcaaaatcagatgggggcatcacggtatccatcggccgcattttaagcttgctcgcacggcgttctaacctcttccgagcctcttcttctacttttgtatcaccactgtctttggtggtttcagctgag

SEQ ID NO: 460 - DNA, 469 bp, Musa acuminata
  misc_feature (251)..(251): n = any nucleotide
  misc_feature (352)..(352): n = any nucleotide
  misc_feature (366)..(366): n = any nucleotide
  misc_feature (383)..(383): n = any nucleotide
  misc_feature (437)..(437): n = any nucleotide
tcttccacctttcttcttttggcagcttcaatcctctcttctactgtcatgtcacttcgggcttttccttctttggcttcatcatagccaataagttcaacctcataaacaaggtctgccataggggggacgtttgggaatgaaaaatttccttctttcccgtagccaagttcccaacccacatgaaagagtgcacgttccccactcctcatgctagcaatgccgattgccaaaccagccagttctgcttnttcttttcccaatataagttcaattggtcgctgctcttgccaagtatcttcaaacttgtgtgaagtgcttttaacccatgccctataattcaagaagcaantggacatttttggnggtttttgaccatggcnttcttaataatttgctttttgactttctcatgaagaacctccatctctgactcnacttttggtaaatctttatcatcttgggcagg

SEQ ID NO: 461 - DNA, 466 bp, Musa acuminata
  misc_feature (460)..(460): n = any nucleotide
acatattcctaaatgtcacatcagcacaggtagcaggagatatgtagtccatgatatcaatgtgaatatcattgaggacaacaacagttctctcgagcacatttgaagtttcatatacaatattaccaaatatcacaccagtttctgttgaggagacttttatattagctcgtatttgtttgcttgattctggagcgagagtatagttctgtggtcggtcaacaagtttgaggtctcccatggttgctaattccaaacacaggttctgaagtgtttcctttgttcggttaatcactgtgacgtctagaactatgtcataatgatgaactgtgacaaatgcctcagcatacacaggatcactgaatccagtgagttgaaggattcgattcaacttatttgcatcatctccatccctcataaattcgccagttgcacgtttcagatcatcttgaacctcatnctccaa

SEQ ID NO: 462 - DNA, 1039 bp, Musa acuminata
aattcaacataattaatcttcaatcaacgcgacagagaacatcaattggggtcaagcatccatgggaagataattgaaatagctacaattatcgcctactaccccacaaattgttgcttgccattagcttgtagacatcagtgaagagaaaccaatcccatcaatgaaatcacaagagatactgaagaaggaagatgcctcatataggttctatttggtaacttgaaccataagcccacacaatatctagggaactgactgttccacgaaactatgaacattccagtgaaagcgaacaaccacagaagaacaactcgaccacacaagcaagaggtgcataggcacactcaattggcacggcctcttataacatcaaggcccatctcagtaggatcagttgcttgcaattcaacctgaatgccatccagctctctcttgaacctgtccttggagctcgcatagagcatcttgcttctcactcttgatgtgtcaggggaccacgcaataaaaaagatcttgcttttctggcaattctcctcggtcacaaagtcgaaatcataaattgcatatctgcattcatttgtaggaagactggcggtaaaatcatcgtatgtcaaattgggttcgccaagcgtctccacgatgacctgcttcagcttctcatcgatcttaaagactatgtaacggtaagttcgctttgccttcaactccaagaacttcaacttgcagtcatcgttcactgccattcctgatgcagcattagccattttgtgggcgacggcagatgagggcatcgaagaagaggaagaagaggaggaagaagagtacgatgactatgagagcgagtacagcgacgatgaggacgacgagaaggaaaagaaaggtaaagttgcaaacggcattgccaataagaaagaagagtcaactccagaaggttcaggcagcgacgaggagtgaagaactctatttacaaagttttcattaattcatcctgtagatcaaattgtgggctcttgtccgaatcatgccaacattaatg

SEQ ID NO: 463 - DNA, 581 bp, Musa acuminata
  misc_feature (59)..(59): n = any nucleotide
  misc_feature (149)..(149): n = any nucleotide
  misc_feature (267)..(267): n = any nucleotide
  misc_feature (481)..(481): n = any nucleotide
gaaatcgtcaagtagaagaaaaagaacacaacttatcagtacaaatattgatggaagtntcggcctcactcgcattgctctcataacttgtatgtcttatatcactgaagtcaacagaatttaatacctccatagtccatataatggcnataaaattcgttttatgtgctttcagtcacagatatgttttacttcctaataagaagaaccacagtatgtgctgctatacttctgttttctccaagactgtcgaccttctcatgtgtntttgctttcaggttaacgactgaagggtgcgctccaagcagatcacacaaattagacctgatagcctccttatgagggcttacttttggcctttgtagaatcaaagtggcatccaagtttcccagctcataaccagcttcatgcatcagttttacagcttctctcacgaagaccgaagaggcggcggccttccacttgggatcagaatccgganagatctgaccaatatccggaagccccaaagcggccaaaatcgcatcgaccacgcagtaaggaacacatccccatcggagtgcgcctcgagccccggtcgt

SEQ ID NO: 464 - DNA, 580 bp, Musa acuminata
  misc_feature (17)..(17): n = any nucleotide
tcttctgcctctgactncacttcacatatgctcatgagaatgtttccagaaaagatcgtggagatcggtttaaacgtgaacaagacaacatgaactaggtatagtgttcagccacaaggttaccacaacgacaatgatcgacagtacgcagacaactgaaagagtacggttcatcacgaactcagctgattccaaaaagatttttgttcactgctgagcacattgcactctctgggcaccaccatgcatatcgtcatcctcctcgtaagcctcctgtgcctgagcctgcttcctgcgcatctcttcctcgatgttaacatcatgcaatgtcgtctcctcgcactcatccagctccatgtcggtcatctgcgatgcaggctttgggggaagaacagactcgagagctttgcactgttctggtgtcattgaatctgggaagtccacggtgaagtggatgtagagcttccccctcatgaagggcctctggtacatcgggcatgccctcgtcattgattgccttgaattgatcgggcttcacaacttcactggggttggactaatcagtagctgtctgttatcc

SEQ ID NO: 465 - DNA, 539 bp, Musa acuminata
  misc_feature (6)..(6): n = any nucleotide
  misc_feature (311)..(311): n = any nucleotide
  misc_feature (509)..(509): n = any nucleotide
cgagtngagaaggctacgagcgatcttctcatggggccggactggactttgaacatggacatctgcgactccgtcaactccgaccactggcaggcaaaagatgtggtcaaagccgtgaagaagcgcttgcaacataaaaatccaaaggttcaatttttagctttgacgctattagagacaatgatcaagaattgtggtgactatgtgcattttcaagttgttgaccgtgaaattctgcatgagatggttagaattgttaagaagaagactgatatgcaagtgagggacaaaattttggtattactggattntggcaagaagcatttggtggggctggaggaaagtatcctcagtattactgggcatatgctgacttaaagagatctggagtacagttcccagaacgcccccctgagtctactctaatatttactcttgctcccgtacatgcaatgcccataatcagaaatcctccagtcgagcatggcatgcccaacaattcctgcttnaagacttgacgaactatggcatctgaaatg

SEQ ID NO: 466 - DNA, 443 bp, Musa acuminata
  misc_feature (367)..(367): n = any nucleotide
tatatatttatttatatgacctttcacaaaagatcctgcaaagtataaaagcacaacagggttctgaaacacacgcactacaaacatgcacaaccatccatacagacagtcttattgtacgtatctgcctcctgtatatattttgcgtcgtcaacggaacaactcctccaggctgccgaagtagcctatcatggggtcgaaggcggaggcggaggcggaggcggaggggtagaaggcggacggcagtagtaatggctcccgcatcccctcgtatagggtgttccacggcgcgcgggcttaccgctagaggcatggtatataatctgcgctttcgcttccttcacaggggtcgtctcccctctcgctntgacgaggaagacgatgatgacgagtgtgaggaggagagaagcacgactcttgacgactgtcctcatcctatcgtc

SEQ ID NO: 467 - DNA, 595 bp, Musa acuminata
  misc_feature (318)..(318): n = any nucleotide
tggatgctatttagttacagattaaaatctgatgacaagtagtcttttaagtaatgggcctccacaatttgggcaaatcacactaccgtcccatcaaagatgctgactcactgaaaactgcagacgatccatactcttcttcggtgccgccgccacagaactcccaaggcacgccgagagaccgccctttcttacgtctctcccgtgctgaatgttgcatgaagagccttccgagcgcgttgagctccaccgtcacctccttcatcgtgggcctgtcttcccctctcaagttcaagcatcttctagcgagctgcgcancgcatgcagctgcctctcgcctgcctcctccaccgttcgacggtccaccacgctaaggagcctcttctcttccaacaacgtaacaaaacggaaggccaaatttcactcttcttccggcctcccaggtgatatgggcttctctcgatcaacagtccatcagaaccacaccaaagctatacacatcgctcttctccgtcaagatgctcgtccggaagtactccgggtcgaggtacccgagggtccctgaacaacgtcgtcagatgagtctggtcgtagg

SEQ ID NO: 468 - DNA, 596 bp, Musa acuminata
  misc_feature (15)..(15): n = any nucleotide
cgtatgctattagcnggtggaagaagagaaggattagattacaagatgaacgtgaagtgtgacagcatcaaagaccagagcggcttaacccaacggacacatcctatatactgagcacgaacacagtcgcagaactgagccctccgcaccatcaagcagcggcctttctcgccttcttcgccgctggggacctgatcgacttgggctgcttcggcttcggagcagcggccttctttgccttcttcgcggtacctgcataagctttcctcttggtagcctcccttggcttcctcgcttcccgttcaggctgctgcttcttctccatcttcttcgtctcgccattctttccggcctccgacagattgaatgaagcctttaccttcacaagcttcccctttgccgtgaagttcctcagctggaccgccaagaccttcttgtagttctgcggcagactcccttgtgcttctcctccatgaacttggcgatcgcgtaggggctcgatccggtcttgtcgttaagggcaacgatggcctccttgatcatctggaaataaggcgggtgagacggggcgaaggttggaaccgtgcgttcttatc

SEQ ID NO: 469 - DNA, 576 bp, Musa acuminata
  misc_feature (11)..(11): n = any nucleotide
  misc_feature (476)..(476): n = any nucleotide
  misc_feature (527)..(527): n = any nucleotide
  misc_feature (533)..(533): n = any nucleotide
accttcttatntacactgtcaaaggtactacagatacagttggttatgatttttgtgcagagagtacagagaggaagtgaacattatgtccttgttgctcctgtaaacctagaagggcccagacgtgccctggtatatgctatgggcaatgaagccagtttctttgcttttcctacaatgcacgcctcgtgaagttgttgtagtcattttcttcaatggcgtcaaggatctgtcgatatagcagcagagaagccaaaaccggccatctgctagctgaattcagctcgtatatgcccttctcagcctcctcaaagaacatcctggctcgcctaatctgtcccttcatgaagctcctccattcgtctgtcactcttcctttgaagatgtcatcatctgatagaccagcttgtgccaattcatcctgcggaaggtagattctccccctcctagatcttctccaacatcccttagtatgntggtagctgattggcaatgccaagagccaaggctgtttgtagacgctctcngtcgangccttcgaatctggggcatccccatcactggcaaatcatcagc

SEQ ID NO: 470 - DNA, 568 bp, Musa acuminata
  misc_feature (11)..(11): n = any nucleotide
  misc_feature (31)..(31): n = any nucleotide
  misc_feature (38)..(38): n = any nucleotide
  misc_feature (86)..(86): n = any nucleotide
  misc_feature (94)..(94): n = any nucleotide
  misc_feature (119)..(119): n = any nucleotide
  misc_feature (190)..(190): n = any nucleotide
  misc_feature (258)..(258): n = any nucleotide
  misc_feature (266)..(266): n = any nucleotide
  misc_feature (297)..(297): n = any nucleotide
  misc_feature (327)..(327): n = any nucleotide
  misc_feature (410)..(410): n = any nucleotide
  misc_feature (434)..(435): n = any nucleotide
  misc_feature (441)..(441): n = any nucleotide
  misc_feature (448)..(448): n = any nucleotide
  misc_feature (450)..(450): n = any nucleotide
  misc_feature (453)..(453): n = any nucleotide
  misc_feature (478)..(478): n = any nucleotide
  misc_feature (486)..(486): n = any nucleotide
  misc_feature (488)..(488): n = any nucleotide
  misc_feature (493)..(493): n = any nucleotide
  misc_feature (535)..(535): n = any nucleotide
ggattagcatntgtctaactgaaagtatcancaataanaaaatgcaacatactcaatcgtgtcccaaaactaaatagaatacagangcagtagnatctgaattcataagactcgtgtcncttacggatgatcaatagaagagcggtgtgaatgaagaagggccagctcgtcctactgggggtgctgctgntattgcaatgctgattggaccaaatgctccaatttcttttgaaagtaaattcagaggaactcatatgnctcatgtntatgatttttataagccaaatctcgcaagtnaatacccggttgttgatggaaagctatcanagacatgctacctcatggctcttgattcttgttataaacgtttttgcagcaaatttgaaaagtttgagggaaagcaattctcnatttctgatgcggattattttgtnntccatnctccctntnacnagcttgtgcagaaaagtttgctcgnctctattntnaccgnttcttgcgcattcaagtgttgtcgagaggatgcaagggaaangctggagcagttctctaatctgactggtgatga

SEQ ID NO: 471 - DNA, 567 bp, Musa acuminata
  misc_feature (9)..(9): n = any nucleotide
  misc_feature (493)..(493): n = any nucleotide
  misc_feature (514)..(514): n = any nucleotide
gattaaagntttgttgaaatagaagacgaagaacatttcatggactccattcccatcgaatgagaaatgaggaaaatgaagccagagatcacgagagacgaatataagttagaaaagcagaggcgcacacagatttgagacgaagaagaaaatgatctgaaactaactaagacagaataaaataactctccaactaacctccggtggagccgtccgccggattccgagtttagttaattaggacgagggcggaggagcggcgagcggcttccggcaaaggatcatgtgcatgggggtgaagatgccggactcgccgccgtcgctgaggtggcgcgccgtctcgtagagcatctcgtgcacctccaccacgcccttgggggcgactcgcagggcggtgagggcggagacgagcaggtggttccgccagtaggagatccgccccatcttgaggcgagtccaccacggccccgtgggggcagcgccaggtcgcgtnctccggcacctcgaagcccantgccgcggcaactccggatctctgtgcgcacgagcccggagcggacggtggtc

SEQ ID NO: 472 - DNA, 731 bp, Triticum aestivum
gatcagatacactgactgttagtattgtatctggcgtactccttaagaggaccgacatgttctctgctctacatgctagcggggctctctccaaatgaagagagtattataccgtgttgggatataccgaggatcctggcctcatccaagccatcagttcctcttgtgcttattggaccaggaacaggatgcgcaccattccgtgcgtttgtggaggaaagggctgcacagagtgtgacagaaccaactgctcctgttctattcttctttggctgtagaaatcaagataatgattttctgtacaaggacttctggttaaatcatgcccaggaccagggggtgctttccctagaaaagggtggtggtttatttgttgcgttttctagggatcaacctcaaaaggtctatgtacaagataaaattagggagcagggtgcaagagtgttgaacatgttatgctcctctgaggctacaatatacgttgctgggtcttctaccagaatgcctgctgatgttacggctgcattggaagaagttttatgtcagcagggtggtgttccaaaaaatgatgtttcgcaatgggtgacgggtctgaaaaagaatggcaagtttatcattgagacctggtcataactgagatatatgttgggtatcaggtttctgttatttatatgggcactatataatcagtgtacgatgatgttgagcatataatgatgttgttttcacaa

SEQ ID NO: 473 - DNA, 964 bp, Triticum aestivum
gcatggcaaagtttcatgggatggactaatttcacaggcaaaaatggctggtatggatttgtcagcaagagaatattacattcctggggcttctggttcatacctaaactacggagctgctgctagtgaggtagagattgatcttctcacgggagcaactacggttttgcgcagtgatcttatatatgactgtggccagagcttaaatcctgctgtggacatggggcaggtggaaggggcctttgttcagggaattggttatttcatgagtgaggaatatgtgaccaatacggatgggctggttgtctcggacgggacttggacatacaagatcccaaccgtggacaccatccctaaacagtttaatgttgagctgcgcaacagtggatttcacaagaagagagtgctgtcttcaaaagcatctggggagccgcctttgctccttgcagcttcagttcactgcgcaacaagggatgcaattgccgcagcacggaaggaactccactgttgtgggtctggatcgtcttcaccttcgttctttgagttggaagttccggcaatcatgcctgtggtgaaggagctgtgtggcttggacaatgtggagaagtatttggaaactctagtgggttccaaataaatacagacgaatttcacatttggcaaagtaaattataatgatagcattataaggtatacttcttgcatagtactctgggcatactagaaggtactgtgtgatccacttgttaacgcatgcaccattcgactataacagaattttgtttggttgtgccacatttgttcgataatttcattcaggtacggacttacagtacatagttcttaggtaacattttgtactagactgatggatggatacaggtatttgtgactcaaataggcaaaacgatgagagtaaacaaatggaagatgtatacttggagcatgatgagacatggtcatg

SEQ ID NO: 474 - DNA, 720 bp, Triticum aestivum
caccggcgcattgtgcaatacaagacagcgtactattcattttatcttccggttgcatgtgcattgctgctgtcgggtgagaatttggataacttcggcgatgtaaagaacattcttgttgaaatgggaacatactttcaagttcaggatgattatctagattgttttggagatcctgaatctattggcaagattggaactgacattgaagactacaagtgttcctggttagttgtgcaagctcttgagcatgcagatgagagccaaaagggcattctacttgaaaattatgggaagtcagatccagagtctgttgcaaaagtgaaggatctgtataaagaacttgatctggagacggcatttcacaagtatgagcgggagagctacaataagctgatcgccgacatcgaggcccagccaagcaaagctgttcagaaagttttgatgtctttcctggagaagatctacaagaggcagaagtagagctaagctcttggagaggttgttgtgcctttccgtgctttggtaacttattccatgttctgtgtgtgttggtcttattaccataatgtacagcgtgttattccttccaacaataaactacggtgctattttttagtggtgcgtgaacctgctgtgccataaccatgttatttgaagctctctaatgtttttctagcctatcatttgtcatcaattagtttgcgtgcaatttgaagg

SEQ ID NO: 475 - DNA, 674 bp, Triticum aestivum
cgtactaaaatggatcatcactgtgttgggtagtaaattgtgtcggagcaagggattacaagtattttctccttttcctggtgtatactttcctcgagactgtgctggatacattggtgctacttccaagctttattatcttctttcatgatggaagtaggcgccccagctcagctggtgatattgccattctatttcttgctttcgttctaaatttggcgtttgcgctgagcctcctttgcttcatatgcatgcacacgtctcttgctgccagtaatacgacttctatcgaggtatacgagcgaaagaaaacatgctcatgggagtatgacctaggatggagaaaaaacttggagcaggtatttggcaccaacaagttgctctggtttcttcctatgtactgtaccgaggatctgcaaaacattgctacaattcaaggccttgaattccctactcgttctgatgcagtgctgtagttgcgatttggttgacagtatattcttgttatgccatacggccatctcactttgtagattaaaccgtcttacttctgtacataatcatcatttttctgtacaaagctacttcatccgtccgagtttagggcaactccaatccgcgtcaccaatcacccgcaaatgtatggactggacagtgtagagattaagggtcat

SEQ ID NO: 476 - DNA, 782 bp, Triticum aestivum
tcacatatcgtcactatgccctctattgaggtgggcacagttggtggtgggactcagttggcgtcacagtctgcatgcctggacctgctgggcgtgaaaggcgccaacagggaatcgccaggatcgaacgcgaggctcctggccaccgtggtggcaggcggggttctcgccggggagctgtccctcttgtccgccctcgccgccggccagctcgtcaagagccacatgaagtacaacagatccagcagagacatgtccaaggccgcatctctaagttcttgattgattgactcgacgagctgcagcccaagaaaccaatggagaaatctagagtgtggcttgattctacacacaggaagtgctcatcaacatcaagctgagaagagtttgaccagtttctttctcgatgctggccggtgtttctgtcgtcgttcttcgcgtgctgccgctgctggcatcgtcgacggacggccccgggcggcaccggagaagctaacctttttagcctgtttgtgttcataaggctttgtggttggttgggttggttaccttggcgcgcaaagtgtggggatctttttgtagcatcgaagtgtagagatctctctccttgcttcaggaagccagccttgtagtggtatctgtttcaccttttgtttgcttctttttcctttatgctagtcgaacaaatattacgaaaagatatggtaacgtgattgtagaaaaaatgtgggtctcggcggagattcatacacaagaagcaataggaaggcggcatccagtcc

SEQ ID NO: 477 - DNA, 1093 bp, Triticum aestivum
tgtcacggtgctagggactgagccacagtacccatatctgactgatccaatggttgataatgagctgcagagggctgccgaaagtgttccaattttcattactggtgatctacaccgagatgtctctcaaatttgaggatgagatagataattcccttctagaactgaagaaatctcaggaagcagaatacaggctggcagagcagaagctttattctcagaaagattatatcctcagtctgtatcggcagcttgagtcagacaggtcccagcttgcagatcctaaccccgtatccgatatctcaagctacagcgtgcttctctccaacattactaaccgagtggaacaagtgaagcgcgaggaggagaagttccagaccatgctcaaaatctccaagggattccggaaagcaccgccgaacatcaaggagcactttgggttgccgccaccagcggagtagctcaaagtttgactagcttgaacttagataccatagtttaccctgaactgtacattgggtatgttgtctcttgtgctgttgtactgttgtatacctgtctccgacaatgtgctgctccagggtgcaccgccaggctgctgctctaggaagagtcccccaacatctgaattaccagtttcagactttaatcgtacattcagagttcagtgatgactatgctggtaatttgtgtttattctgtgatttgtcgacatgatggtacaaccaagttataggttgctgctgtcgtaactgcgagatggagaaaatttggcaacctggaacaggggaatatcttgaaaatttggcaacctggaacaggggaggctatcttggaattgtgcagcagatgccagtatgccacaattcccctttcctgcatttgctgcttcagttgcctgtttccctgatgtctatcttggaattgtgttgtgtagctgctatgcaaagtgattttgatgcatcgctcctgtcgtttattcgctagcgtgctggagatttaagatttttgtaaactttaggcagcgaagagttgctagcaaatggacacagatgtttcggccccataggaacgaagaaataacggtatttat

SEQ ID NO: 478 - DNA, 728 bp, Triticum aestivum
tggtggaaaagcctgtagaatatattgcttagctgtaagaacttggacgcaggatttggagctatgccaggaggggagtctcacgctggcagatattctgctgtgttggtgctctcgcaatcaccggctctttgcatcacattgatagagatctccttggatggtggctctgtgagcgccagtgtagagatggagggctcaatgggcgtcctgagaaacttgctgatgtgtgctactcatggtgggtgttatcaagcttgataattattgatagagtgcactggattgacaaggaaaaacttgcaaagttcatattgaactgtcaggacaaggaaaatggtggaatttcagatagaccagataatgcggtcgatatctaccacacgtactttggagttgcagggctttcattgatggagtatcctggagtgaagcctatcgatcctgcctacgccctccctttagatgttgtcaacaggttcttcttgacaaaacaacagtagtgtgccttagctaggaagatcatgttgtgactgcgttggcgtcaggtcagcacgagtggagagcttacccctccttcggtagctcgcactgatgtttctgatcactcccatgcatgagatcatggctttgaacgttagtgcagacctcatatttaccatgaaatccggacacttggttatgtagaagagtgtaacgtccaaggactgagaatcaaattcaatcaa

SEQ ID NO: 479 - DNA, 715 bp, Triticum aestivum
tggtaggaacacccaggctctggtttgctggttgtgttcttgaaagagcatcttaggcatccccgatgctatggcttccgtcttccatgcagtgaacaccattagtgaagagctttccagcattgttgagttagctgccactgatgagatagccatgacctcaaaggaagaaaagctagcagaactcatggagatgaaccaaggtttgctccagtgcatgggagtcagccattcctctatagaaaccgtgctgcgctcgacattgaagtataacttggtctcgaagctcaccggagctggtggtggaggctgtgttttgacgttgataccaactctattgtccaagttagttttggagaaggtcaccacggagctagaagcgcatggtttccgctgcttcaaagtcgaggtcggtggacaaggtcttcagattcaccaaggataagataatgctcgctcctctttcaatggagatgttgtacactatttttaggtttgcttgaccttctgagacgaaagtattctttctattctgtgcctagcagaccacttactgtatcaatcaataagcgagtttgtcagtcgcatgattgttgttgtatcagatcaataaaccctgttccatagtcgggcgtggttggaaggaatatttgaggtgccatgttgcatctgatctgatgtatcattgttatcaaagttgagttcattgggttgg

SEQ ID NO: 480 - DNA, 649 bp, Triticum aestivum
ttccgcgaatggttttctataatgccgccaatgccgcactgattaacttcttcgagaccctacggtcggagcttggtagtgaagttggcatcacaatagtgacgcctgggtggatcgagtccgagatgtccaaaggctaagtttctcaaggagcacggcggcgtggaggttgatcaagaatatcgagatgcccaaatcggtctcttcccggtggagtacgcgaagatactgcgcgagggccatggtgcaggcagctcgccaaggtgaccgttacctcaccgtgccgtcatggttcggaacaatgtacctgtggagggtgtttgcgccggaggtcgtcgagttctgctaccgcctcctgtatatgcacggccatggcggtggcgaccagaccgacgcgccgagcaagacgatggcccagggtggcgggaagcagatgctgtacccctcctcgctgcgctcttcggacgtcaaaaacgactagaaacttactatagttcgcatcctttgatcgaggacgtggatcctggtgtgcaggctagtttgttctctactaagctttaggtgtggatgctactgctggttagctagtttgtaatcccgaataagctgtgttctgtgttttgtaatattagtgttgtgttgtgtgctt

SEQ ID NO: 481 - DNA, 827 bp, Triticum aestivum
agagctggtaacatctgagtgcactttgctgaaagcatgatgagtcccgtatctcttaatcatggaggcattgggtggcaactctgtatggcttgatcgctttcttgcgcggtttagcgcctttttttactacttcgtcactgttggcatgtacatgctgagcccaagaatggcatatcacttttctgaatgtgttgagaggcatgcatactcaacttatgacaagttccttaagctcaatggagaggagttgaaaaaattaccagctccagaggtggctgtaaactattacatgaatgaggatctctacatgtttgatgagtttcaaacatcaagagctccaaattctaggaggcctaaagttgataacttgtatgatgtattcgtgaatgtacgggacgatgaggcggagcattgcaagacaatgaaggcctgtcaaacgcatgaaaccctccgttctcctcacgccgtgcagagctcagtagaagctgatgcagaatgattctgtcaagaagtcccttggaaatgaagactgaccggttgtacgtacctccgtgctagagcatcgtagagtatcatactaaattttggtgatatattgtattccatcctttttctcccttctcttcgtatgtagacattagccagacttccgtacttgtgaatcttacatagagaatataggtttataaatgcatcacagatttacaatgagagatgtgcaccgttggttaggcattaccgtgggccatgaacggtgtaatccagctgtgttgtggtttgtgtaacatcaagggttttgatgcttgttgaaggaaaagtcttga

SEQ ID NO: 482 - DNA, 825 bp, Triticum aestivum
gtcatgtatctcaagttctttttattttatactcgaagatgtcatattctattgggggcacagggctcttgcataccaaatggcttatacaagcatgtccacagtgtgcatcatgaatatgctacaccattcggcttaacttcagaatatgcacaccctgctgaaattttgttcctggggtttgccacggttgttggtcctgccctcaccggccctcacttgttcaccctttggctgtggatggttttgagggtgttagagacggttgaagctcacagtggatatcacttcccttggagcccatcaaacttcctgccactgtatggaggctctgacttccatgactaccatcatcgtgtgctctacaccaagtcagggaactacgcctctacttttgtttacatggactggttgtttggcaccgataagggttatcgcaagacaaaagccattgaaggggaagaagggaagcatttgtaaattgtggaagctactctcttttctccgagtcaactcatcagaactagtttttgatctcttgtattggtgatgacattgtcttcatgggaggagatacatgcggcattgatccttaggcatgggccgtcgatcctacatgtcgttgagtctctgttctcccatatttgctagcatgatgagatcatgtgttgtgtaggccaacttatataatttgtggtgaattaaatttgttgtgctctgttggggtttgttttggacatatgcccatggcagaagtaactatttgaagcagcaataacttgtcagattagttgttttgcaagtcgagtaaatacccgagatgag

SEQ ID NO: 483 - DNA, 598 bp, Triticum aestivum
atgctaatgttgattatcagtatccctcggtaacaactcaagatagtgatactgatagtgccgcatcctctgttggtagttgcatccctacggtagcccctatagacaagcacatcctcaggagtacgacagtggagatatttgtagtaggactgatgatgatgatgaagcttctgtatctggaactgaatcacctcttccaattaaaggtggtctgggggaagaaacccatctgcttgagttgcatgcttatcgtgcaacaatgatggcactatatgcttatggatcaattagctgggagcaagaggctttgatgactaatctgaggcttacactgaacatctctactgatgaacatttatcagagttaaggaatttggctaactctgcagtttgttctagatagccattaaaagttatgaatgaagaggcttagaatttgtttgttatgttgtcatattgcttacttcagaatagtggatttatggttagtgtggactctgaagataccagtcacttgttggtgtacttgacgctctgtattaaccgtgtagaaaggggaattttttgtatgatagatttattaacctcctcagta

SEQ ID NO: 484 - DNA, 908 bp, Triticum aestivum
ggatcactgaacccagtcaactgaagaatgcggttaagcctgtttgatcatctgtttccttactggatcccaccaggttggaggctttcaattcatttgggacctcatcttccaactcaagctggctcatgccccttctgctcttcaggtggtagaaatcaataagatcatctggctgggcatgagagatctgtgatttggctttcatctcctccgtctccctgaattgcttctcagcaagcatcttggcaaaactctgcctacatgactgcagccaaatctttctcacgtcatcaccagtattgcaaagcagccgcacacaaagcacaatcctgtcatatgaatcattatcaagcggttggggaaggtatgaggatagccccagctgcagaatggacgtcatgaccagcaaggccccagtacaagccttgtttgcttcagcctttgatggctgcacctcctccagcctcaataccaatttggtaagcgtacaggcaacaactgcagccaagaagaaatcacctgacagaatgagtgatctgagattcagagtcgatgccaatgatccagcagtaactggtggagtcgaaatggcttcagtagcagcactctgtgtggcgtaagtgccatctgcaagaacaacaggccgcctggaagacacagtgacagagttcaccatcggctgggttggcttggaggaatcagttgtctcgccttcctctgagagagtgaacaatggtagatccccaaggcactgcttgatggtagtaatggcactctcgacctccgataatgacagggagtactcaccaagaatccagagagcgattgaacagacacgggatgcacggatctgataaaaggtatcactcagtctctggatcatggacacacgcagctagggatta

SEQ ID NO: 485 - DNA, 792 bp, Triticum aestivum
ggtttgctaaagtgcccattaatgatgagtaccaggaacggtttagtgctactcatgctgaaaaggaagaagctttagagaagctagctgctcatgagggaacaatcacaaacctgacagaggtgcacacaagaaacttggaactccactctgcagctgaatcaaagattggtgaaactgaagctaaattgcatgaagccctcgagacaataacccagaaagaagctgaagttaaagacttgagcaagaagctggatgctctcgagattgagttgggatattatgaagagcaggcaacggaagctgctgccaatgaagaaaatcataaggttaaatttgatgaagttgtgcacaaacttaagagcctagaagtacaacttgcagaaacacaaaacaaggttgaacttttccagacagagaaagaaaacttgattactgcaaatagtagtttgaatgaggaattggaagtacatcagaacaagctgaatgaattacagatgacacttgctgctgcagtagcagaaaagcagggggtgtcggaagagattcattcattgcgaaaaacactcaatggcatgattcaacgcaaggaagagcttgaaagccaggtatcttctactctggaagagcaggaagaactggcgagcaagtaccaaagcacactggaagagaagcagatgttaaatgacaaatatgaaactgtaaagcgggagcttgatgaagctgtagccaaattggaggagcaaatgaatttggagaagtctgaaaaagaatggcatatttcaaaacttg

SEQ ID NO: 486 - DNA, 1174 bp, Triticum aestivum
  misc_feature (1074)..(1074): n = any nucleotide
agaacggggagttcggacgacgagacgacgatcccgtcgcgtcgcacgctcggccagagctcccggccggggaccggacgggaggagggctcctgtggtgaccttcggttcacgccgacagcaagtacggcgagagcggcgacgacatgtcggagcagtacgtggcggtcaccaagcaggagaagaggcggcgaaggaggaggatggcgtgcaaccggtgtgggaagaggaaatgggagagcaaggaggcctgcatcgtctgcgatgcgaggtactgcggctactgcgtgctgaggatgatggggtcgatgcccgaagccgcaagtgcgtcagctgcattggggggccgatcgacgagtcgaagcggtcaaagcttgggaagagctcgaggacactcgcgcgcttgctcagcccgttggaagtaaggcagattttgaaagccgagaaggagtgccaagcgaaccagcttcgaccagagcagcttatcgtgaacggctgcccgttgaggccggaggagctgaccgacttgcttagctgctcgcggccacctcagaagctcaagcctggtagatattggtacgacaaggagtcgggcttatggggaaaggatggacaaaagccagacaggattgttagctctaacctcaatttcagcggcaagcttcacgccaaggccagcaacggcaacacccaggtttatataaatggaagggagattacaaagagtgagctcaaaattctcaaggttgcacatgttcagtgtccacgtgatacacatttctgggtttatgacgatggtcgttatgaggaagaaggacagaacaacatcaaaggaaaaatatgggagtcagccttgacacgttttgcatgtgcgttgttctcacttccggtgcctcctggggactctaatggaaccaaggacgaaattccctttgtaccaagaactgtacctgattattgggatcagaaaagaatccaaaaattgttgcttcttgggccacctagtgctggtacaagcactatatttaagcaggctaagtacctctatggatcaaggttcacccaagatgaacntgatgctatcaaattaatgatccaaagcaatatgttcaagtatcttggaattttgctagaaggtcgtgagcgtttcgaggaagaggctttgtctagattg

SEQ ID NO: 487 - DNA, 935 bp, Triticum aestivum
  misc_feature (890)..(890): n = any nucleotide
ggataacagcaccaaaatgtccatctcaagtaagatctagccaagcttgcagtaataactggaaatggccatcaggatcaccacagaagtgggttctctgctgttcagctctttctgctgctgagaagggtgccgtaacagaatttgcaaaattagctggtgtgcctatttccaagagctggagccccagcgttacccatgtcattgcatcaactgacccctctggcgcttgcaagcgcacactgaagtttctaatggcaatcttgaacggcaaatggattgtctccatcaactgggttaaggcttgcatggatggcatggaacctgctgacgagcagaaattcgaagtcaccacggatgttcatggggtccgtgagggtcccaagttaggaagacagagagtgatcaacaagcaacccaggctgttcaacggcatgcagttctacctccatggagactacaccatgacctacagaggcttcctgcaggacctggtggtcgtggcaggtggcaccgttctgcaccggaagcccgtctcaagggaccaccagaagctgcttgatgacagttcccccgtcatagtcgtgtacagcctcgagaaccaggggaaggcgaaccttgacggcaatgactattatcggcgcaggcaggctgatgatgcccaggctctggcctttgcctctggtggtgtagccgctagcagtgcctggataatcgactccgttgcggcttgcaagctgcaacctctgtgactgaggtcaaagaaggcttctcatgtcagtgggcttagtagtaaagaggaaaaatccagggtggcactgaatacaagtgcatgctttatatcgtgtcatgtagaaattataagacaacattgtgtttttgttgttttntctttcaaaaagaggttgaaccccctgtgttgatgaagagttaaa

SEQ ID NO: 488 - DNA, 975 bp, Triticum aestivum
caatagtgacaggacttcacaaggaagatactgctatggatgctaaaacttaccatgcgtggtcccaatagcagtggttcttccaacattgggctgtatgggagagtgaactgccagtactgcaacccagcttcttgaggaagatgtcttcaataactcagcttggaatcagagataccttgtggtaacacgatcaccaattcttgggggccttgcggcaatgcgcgactcagaagtagattacacagttgaggccattatggtgaaccctcagaatgaaagccctggagatacctcagaggtttatataaggatgataacaatttgctggtggctgataatcgcatttctgatgcttgcctcaaggtcctgaataaggattggacatgcgtatttgctttgagcttcctgcttgatcttcttcgcatgggtttgcagccttcgaatgaacttaaaggaaccatcgaagcaatggagaactctgatcctgaaacgggacatgctgatattgcagtagctgtctgctcaatcctgcagaaatgtgatcccctgcggataaactactggtcatggtaccagaccactctttcttcttagacatctgaaaattcagctgaagacagttttagcagcatgatgtaaactcaatcgaaggggttgacgcagtgtatgaaaaacctttcctgtgatcttggtgcggagcaaaatttgtactgattttactgggaaaaatcaatcaatgacagcatgcccaacaatgtcttgtgtgaatatgttactgcctgatattcacatgttagcagaatgagaataaccaatcaaactccaacgagcagattgttacagtaacggccactggtggtgtgaaaatcctgaaatctgcttcagtcactttgccttgtttacagttgagtctgttgttgtgatctgtacctaatgcatgtacacaatcatcaaattattagtttttgtacc

SEQ ID NO: 489 - DNA, 696 bp, Triticum aestivum
tcgtcactgctgacggccgcctgctcgtcaaggaagcgcggcttccgagccggcggggaccaaggcaagggaggcccgcgaagaagttgctcctgctcccgcggccgacggctggccgtgaggaagctgctcctgctccagaggggcgcctctgcccccgggtgttgccaccggggaagaggaggagaggatcctccgcgtgatctactgcttctcggccgacgatgcatcctcctcctccgccgcgtaatgggcgctcaccacggaaggggaggtgccgctggagctcaatctggcatacaacgccgcggacggggggccaaatcccctcccctgtggggttcgccgtggcgggcgtctcatactcttccggaacctcaggggccaggccatcacaaggttgccctacattgatgcctgacaggttagcctagcaggatgtttgtgcagcggagtgaaaaaagcaggctacattgtcatcaaatcccctgtttctttcttcacagctctgtttccaacagttggccggctccatcacggcggaatcatcagggcaacaagccgaagcaattaggcgtgcaccaattgcggccggaggttgtaccgactgcgggagatgtggaaaaggccagatagcccattgggcggagggccacagctttagcggaagcccacagggaattccaggactccggc

SEQ ID NO: 490 - DNA, 638 bp, Triticum aestivum
cttcaatttacgttacattggcttacgccgcactaaggtcaggtcactcccgagctctgttgagaaactatctaacctgcaaactctggacatcaagcaaactaaaattgagaaactgccaagtgggattgtcaagctcaagaatctgcggcacctatttgctgatagatttgctgacgagaagcagacggagtttcggtactttatcggagttcaagcacctaaagaactgtccagtattgaagagctgcagactcttgagaccatccaagcgagcaaggacttggccgagcagctgaagacaatgatgcaacttagaactctgtggattgacaacataagttctgctgattgtgcaaatatttttgacaccctgtcaaatatgaaacatctttccagcttgcttctttccgggaaggatgagaatgaggcactttgtttcgaggctctcaagccaaggtctgcacatctccacaagttgatcatcagagggaaatgggccaagggaacgctggactgcccgatattctgcagccacggggaaaatctccagtatcttgcactaagctggtgtccccttggcgaagatgaagatccctaggggtgcttgcccccattggcggactctctttttgtgg

SEQ ID NO: 491 - DNA, 577 bp, Triticum aestivum
tagccatggaatgggctgggaatttcctgttaggcaaactaatattgatgggattcttagcatccagcagattgaactgaaaagatttgcaggggataaatccgatgggagagaagcatacatggcttatgctgctgaagggttaggaaacctggtggactggagtgaagttatgaagttccagaggaagaacggatcattgttcaactctccttccactactgctgctgcagtaatctactcttatgatgaaaaagccctcggatacctaaattttctcgttagcaaatttggtagcgcagtaccaacagtgttcccaagaaatatatcttgtcagctttcaatggtggattcccttgagaagattggaatatctcatcatttttctagtgagataaaaagtatcctggacatgacgcacagtttatggttacagagagatgaagaaatcttgttggatgtagcaacatgcgcaatggcgtttcgtattttacggatgaatggatatgatgtttcttcagatgagttatcccatgttgctgaagcctccactttcaataatacactaagggatata

SEQ ID NO: 492 - DNA, 515 bp, Triticum aestivum
cgttcacggacgtcgacgacggcacggtgccgaagcggccagccaaggaggagttcgggagcctcgtggcagcgctgccgcgcaagaatcaggccggcctggagctgcgcctgtaccagggcttctggctgccggaccactgggtggcgggcaccgtcgtcttccagcggcgcttcgtcccacgcgccgacgacgtgatcctcgccagctaccccaagtgcggcaccacgtggctcaaggcgctggccttcgccaccatgacgcgcgacgcgtacccggcgccggcgcacacccgctcctccgcctcaacccgcacgactgcatcccgttcctggacgagatcttcgcggacgggcaggaggccaagctggagaggctcccgtcggcgcgcctcatgaacacgcacatgccgcacaccctgctcctcgagtcggtcaccggcgcggacgtcgccggctgtaaggtcgtgtacgtctgcaggggacccaaacgacatggtcgtgtcggtgtgggat

SEQ ID NO: 493 - DNA, 509 bp, Triticum aestivum
aaacgactgctctccaggtccccgtggcgttcaaggacgccgacgacggcaccatcccagtgcgcccacctaccgagtatgccgccgccgtggcgtccctgccgttgaaccctgccagcaagctcaagttgcgctgctatcagggcgtgtgggtgctggaggactgggtaccaggcatcatatccatgcagcgcagcttctcaacgcgccccggcgacgtggttcttgcgagctttcccaagtgcggcaccacttggctcaaggctctgatattcgccacgatggcccgtgctgcgtacccggcagccagccccggccacccggtccggcgcctaaacccgcacgactgtgtgattctagtggacaggctcttcgccgtcggccgttagggagttctggacaagctgccctcgccgagggtcatgtgcacgcacatgcctttctccggtgccttccgcgttttaattcttcgtggccccggatttaaaaatccgtctacatatggaggg

SEQ ID NO: 494 - DNA, 742 bp, Triticum aestivum
gcgggggcctggccgttcgtgcagtccaaccagctcgcgcacctcggcctgcggtgcgccgagatgagcaggaggcgccgcccggacctcgcccgggaggtgtggaccgtggtcgagcccctgatgaaggccgcctcgctgaccgcccggcggccgacgttcgctgcctcgtcggctttgccggacgaggcttccacgccgtcctacttcgtctgcccgatcttccaggagatgatgaatgatccgcacatcgcggcagacgggttcacgtacgaagcagaggcgatcagagggtggctggacagcgggcacgacacgtcgccgatgaccaacctgaagctcgcgcaccgcgaactcaccccgaaccgggggctccgctcggtgattctcgagtggcaacaacagcatcggcagtaccatgaggactggagatgaccaatccttgaacacgcacgaaatcctgtaaatggtgtacataaaagtttgaatcgaacaaaattattccaacggacggattgaccgatagtgatctggaaaattgcgtgccgtgcgtggagtcactactacagaagaactgctcatgaccggcgagcgccaaaaggctaccggtggcgggagcccggggagggcgtgctgccactgtttatggacatgtagactttctggagagccgtgggtcgaccggcaacacacggtctccaccagatcgaacaatcctctagccgtcgatgctgtgtatgga

SEQ ID NO: 495 - DNA, 425 bp, Triticum aestivum
agacagtgcggagagatacatgcccggcggttgcgaagatgttagaacgatctcttagaataatgtttgaagaacaagacttggtcaaggttaaatcgtatgtggagcgtcaacggacacggatattatcaggaaaagtttctattcaggacttcatttttgcaaaggaggttcgtcttggtacttacagtgcaagggcgtcctcgctgccacctgcagcaattgttgcaacaaagccaatgttgtctgatccacgggcagaaccacgttatgcagagagagtgccctatgatgttatccatggggaccaggggctcgtctcgtcgatatggtcattaatccatatggtctgctagaagttggatccccttataggttaaatgaattatattacataacctatctagaatagttccagcacaaca

SEQ ID NO: 496 - DNA, 234 bp, Triticum aestivum
gcgagaacgaggggatcgagggcgtgcggttcgtggtgacaggcgggcagggcttcgtcggcgccgccctctgcctggagctgatccgccgcggcgccctggaggtccgctccctcgacctgcgcgcctcctcctcctggtcccagcagctcctcgacgccggcgtccgcttcttccaaggggatgttcggaagaaggaggatgtggggaaggttttccgcaatgtggactgtg

SEQ ID NO: 497 - DNA, 230 bp, Triticum aestivum
aagcgagagcaaccacagcggcgtgccggaagaaggagcggagggccttgttgcggaggcacggggggcttgggtcctgtaccagggctgctggctgagacccccggccgcgcagagcgtcatgatcgtgcaagagcacttcgaggctcgtcccgacgacaccttcctcctcaccttccccaagtgcggcaccacctggctcaaggcccttgccttcacagtgacgaact

SEQ ID NO: 498 - DNA, 568 bp, Triticum aestivum
attgggtacagggagatcagaagctctttctttcgaggatggtctatggatggctatactattgcattcgggatccagaaatgttacacacattgagaaagctctgtcggaagcttacagagttctaaagaaaggaggaaggttcctgtgcttggaattgagccatgtggatgttcccatttttaaagacatttacgacgtctattcattttctgtgattccggctgtgggagagctagttgctggtgataggcagtcgtaccaatacttggtcgagagcattcgtcggtttcccaaacaggaaaagtttgctcagatgatccaggaagctggatttgaggcggtcgaatacgaaaatctggtggcaggtgtagttgccattcactctggagtgaaactgtagtataggtcaaatagcagcacggccgacagacgcttccgtgggtggtggtggatctgaatcaggcatttggggctaacaatttaccattttctttgttaaaaaaatcatgtaactattattcctgtttatgtaattcaaaataaggacaggcgctgatctgctcag

SEQ ID NO: 499 - DNA, 609 bp, Triticum aestivum
agtacttgtatatttggctattggatttttccaggacgccaggtttcgaagcggtggatatgacaaggaaagctcttgcttgtgcgtcttctcgatgggaacctgacctaacaaatgtgctaatgagcctggaacatttcatggagcaaaagaatgttgaagcagccgaggagatggcaagcctgctacggaatttagtacctttgacaagggatgtttaccacattttactgcagacatatgttcatgcaggacaaccagtgtcagatttacttgatcgcatgaaaaaagatggttttgaggctgatgaagaaacagataaaatcatcgctggaatatgccagtagatatccgcatcttcctatcactaagcaatttcgttggttgtttatttcccatggcaggtagctgctaaaccatccaattattaattagtttgacttccttccactgcttagtgcttatctaagacactgtaattctttaatcttctatatgacggtgtcacagggcagtggggatgtcaaatatattcttagagtatgttcatttgaaatttgcacaggtttgtacttctgttaggatcagataagatatgatgtaatgcaa

SEQ ID NO: 500 - DNA, 632 bp, Triticum aestivum
ccgttgccggaaaactacaaaggcaccgccatcgaggtcggcaaaggcaggatcatgatcgagggcgagagggtggcgctgctggggtacgggtcggcggtgcagtactgcatgccgcctcgtccatcgtggcgcaccacggcctcagggtcaccgtcgccgacgccaggttctgcaagccgttggaccacgccctcatcaggagcctcgccaagtcccacgaggtgatcatcaccgtcgaggaaggctccatcggcggcttcggttcacacgtggctcagttcatggccctggatggccttctggacgggcaaacttaagtggcggccggtggtgcttcccgacaagtacatcgaccatggatcaccggccgatcagctggtggaagccgggctgacgccgtcgcacatcgccgcgacggtgttcaacatcctggggcaggcaagagaggccctcgccatcatgacggtgcagaatgcctagagccagtgtgctgcctcctatagagaaccttgtacattttggtcgttaggtgattcagagagattagtcggcgtcagaaaattaaatgatcctcatcaagggaaacgttggtagtttttcgttctttggtgcactgacgttgatgtaca

SEQ ID NO: 501 - DNA, 717 bp, Triticum aestivum
  misc_feature (533)..(559): n = any nucleotide
gcggcgatgtcggcggggctgggcgtcggctcggggaggctgcaggaggagttcggcggggcggagggcgccggggtgtgcgtgcgggtgaactactacccgcggtgcccgcagccggagctgacgctgggcctctcctcgcactcggaccccggcggcatgacggtgctcctcgccgacgagcgcgttcggggcctccaggtgcgcgggcgcggcggcgagtgggtcaccgtcgaccccatcgccgacgccttcatcgtcaacgtcggggaccagatccaggtgctgacgaacgcgacgtaccggagcgtggagcaccgggtgatggtgaacgcggacgcggagcggctgtcggtggccatgttctacaacccgaggagcgacctgccgctggcgcccatggcggagctggtgacgccggggacgccggcgctgtacaagcccatgaccttcgacgagtaccgcctctacatccggcggaagggcccccgcggcaagagccaggtcgagtcgctcaaggcccacggagacannnnnnnnnnnnnnnnnnnnnnnnnnnatatccaccggtggaccatcatcctggagcctccagtaataaaaatggccaactggtggtgggcgtttaattagaacggcataaatctcaggacgaggagatgcgatgcgatgtttgtactactagcagtttctggaacgcagacgccgctggcactt

SEQ ID NO: 502 - DNA, 1129 bp, Triticum aestivum
gcaagtacaagcgcggcgacgggttcgtcgactccaccgactgctccgtctgcctgggcgagttccaggacggcgagagcctgcggctgctgcccaagtgcagccacgccttccacttgccgtgcatcgacacctggctcaagtcgcactccaattgcccgctctgccgctgcaacatcgcattcgtcgccgtcggcatggtttccccggagccggagggccgtgctgcgccactggaggaccggaggggcagccacgaattcgctctgacgatcgacgactactcctccgggcaagtgcgcgaagagccacagaccgtgccgagcagcaacggcggcggcaatcaggaagcgaaggatcgtccggggagatccgaggtggccaatgacgcaggggtcgagatcagagaggacggcgccgtcccgccggtcccggccagtgcgccgcctccgatgccggacacgcagcgtgaagcccgcatgtccatggccgacgtgttgcaggccagcccagaagacgagcgtacggtgggcagggagggcggcctcctgcaggcaggctcctcgaggcggtgccacggggagcacagcaaggatggcggcggccgagcaccgccggatgcaccgacgaagaagctgccgccggctggcaggtcgtgcttcagcggcaagggtggcggcagagggaaggattcaggccctccagtgtaatttgaggcgatgatgtttcagacattcttcttcttcttgcattaaccattagaacacttgaccgtgatgatacttttccgtcgtgtgcttccggtggagatcacgtcgccagccgaatgaaaatctggagatttcttcttcgtcgttatgatctctacttacgaatcgacagcacgctgcacaaatcctctctgtgcaactgcaatggctgcacctgctgactggtgagagatcctgcacctggttggtgattgtgcaactctgttagataaagtgtataggaaatgatttctttctcttattcttccatgttgcctctcctctcttctctacacgattggattctgctccagggcattcttactctggacttagtgagttaactatatactcattaggcaaagtactttgtttgcaat

SEQ ID NO: 503 - DNA, 494 bp, Triticum aestivum
gacacatttagagtgcatcgcatatcctctcgctctcgcaccagccgccgtcgttccccaccccctccctcgccgccggcgccaccgcgccgccgcagcgccatgctccggctccgtacgtgcgtcctcgaccacctcatctcctctccagctacctctcccgtatcctctctccaccgtctcgtctccgccgccgcgcccgccgtttccccaaaccctagcttcgccgtggaggagtacctcgtctccacctgcggcctcacccgatcccaggccctcaaggcctccgccaagctttcccacctcaagtcccccgccaatcccgacgccgtgctcgccctcctcgccggcctcggcctctccaccaccgacatcgccgctctcgtcgccagggacccgctgctcctctgcgcccaagtggagaaaaccctggcccccaacgtggcggggctcaccggcctcggtctctcgcgtacggaggtcgcacgcctcgc

SEQ ID NO: 504 - DNA, 1426 bp, Triticum aestivum
gacgagaagggaaaagagccagaggaggctttgaaacagatatgtggtatctgcctctcagaggagcagagagctacaatacagggtgtgcttaattgctgctcacactacttctgcttcgcgtgcatcctggagtggtcaaaggtggagtcgaggtgtccactgtgtaaacggcgtttcaacacaattaccaagtcatcagtggcagatctaggattggggttgaggaatgctcccgttagggtagaaaagcgcgatcaggtataccagcccactgaagatgaaatgaggcgttggttagacccatacgaaaatgttgtatgtatagagtgcaatcaaggtggtgatgacaatctcatgttgctatgtgatatatgtgattcctctgcacatactttctgtgttggtctgggaagagaagtacccgaagggaactggtactgtggtgggtgtagatccagtgtggaagggccttctcatgcacaaacacaggatagggtggttcaccgtggagatagtaacatgaacaccgccgatagcagttctggttcgttgggcagatctacaccaagtggagtgtccagagaccaccaccaataaacgttcagccttctttgcaaggatttgatctgaatctctctccaatagaaacccctgaggaagataagcgagccgagtcacatctctcagctgaacctgtatcaactcctactgggaggcatgcaactcttgataggaggcgtgccttgaaccgacgcattcgtattcttctatttagacctaggactgcaactaatgcttggcagaatagcattcagcatgacagaagcgcaccaggaacagaacaaaatcaacggatcacctgcacctctacagatgtgagcccatcatgttccagggctgattttatgcagagccagcagagtagctcacattttgtacagtctgcaagtaatcttaatcaatgcactgatgagggtggaagcaatttccgagaagtagcaaatgccaaggaccagctgattcctattgtcaagaagagcatcaagcacatttgtgcccggtctccattggatcaatcttctttcacgaatgtagcacggcgagcgacacacactatcttagcgttgtctgggattgcacacaacaaggatagggttgtttctacaccttttccttttcctagccattgttgccacgcctgtgatggccgagagccagcgtttctcatgagaaccatctgctcgtcatgcttcaactcattcgttggtgatgtcgtcagtcacatcgctaatatgttttcttgaagtaggtggtctttttaagctggcatttctctctctgctgtcgtcattctttgaatttatagacacttggaaagattatacggatacgaaggtgttaatgaatgttggatagcttgaaa

SEQ ID NO: 505 - DNA, 1240 bp, Triticum aestivum
gcaaccccttcggaggtgcgggagcagtaggggcaggcggcagcgcatggggtgaggattggttcatcctctgaaggttagccttgaggaactgtacaacggaacatcaaagaagctctctcttgcccgcaatgtgctctgctcgaagtgcaatggcaaggggtcaaagtccggggcttcgatgaagtgtgccggctgccaaggtgctggttacaaggtgcagataaggcagctgggaccaggaatgattcagcaaatgcagcagccttgcaatgagtgcaggggaagtggggagaccatcagcgacaaggatcgctgtgggcagtgcaaaggcgagaaggtggtgcacgagaagaaagtcctggaggtggtggtcgagaagggaatgcagcatgggcagaagatcaccttccccggcgaggcggatgaagcgcctgatactgttactggagacataatcttcgtcctccagcagaaggagcaccccaaattcaagcggaagggcgatgacctcttctacgagcacaccctgaccctgaccgaggcactgtgtggcttccagtatgtcctggctcatttggacggcaggcagctgctcatcaagtccaaccctggcgaagtcgtcaagcctgattcgttcaaggcgatcaacgacgagggcatgcccatgtaccagaggccgttcatgaagggcaagctgtacatccacttcacggttgattttcccgactcgctgagcctggaccagtgcaaggcgctcgagactgtcctgccgcccaagccggcgtcgcagtacacggacatggagctggacgagtgcgaggagacgatggcctacgacattgacatcgaggaggagatgcggaggcgacagcagcagcaggcacaggaggcctacgacgaggacgaggacatgcccggtggcggcggccagcgggtgcagtgcgcccagcagtaggcaggcaggatgttgtgatcgtcagtcagcagatgaattcgtttctgttgttctcaagttttccatgttatggttcttacccttttggtgctagtatatgatgtaactacttcactgaacaataccgggtcgtccaggaaaattatttgccttccttgttttgcttgccgtggcatttttgccggagtagttggctgctgatgagcagagttgccatgtagttggctactctaatgggcagagctgacagcatgtttgtttcatgggacttgggattaaacg

SEQ ID NO: 506 - DNA, 412 bp, Triticum aestivum
cataggtctctccatcgggtgacttatcgtagagaacctctcggcatccccacttcaagtgaaacctaccacccctgtctgttatgtacttctttattgggccacttaagtaaacatcaggtgagccctttagcatgcgcaacaaagatgcctctgtctttgtggcaaacagggtgaaaatagtaagcatgcatcgagcactgatattatcacagtcgataaacccaagagcataagcaacaggatcccacattcttgtgatgctctctcgagtaccacctctagacatgaaccaatcagtgaaacttacatcatccaagtcccgtacttgttgcaatgcaccgtctggatcaagaagagctcgaacaactgggcttagggcgagagcaactgcattccttgccttatcata

SEQ ID NO: 507 - DNA, 724 bp, Triticum aestivum
agacgttgtccttaaaggtgtcattggagatgatgaatatgttgtcctcctaggagcaacggcagtgcaccatttgagcacatctcatttagggagttggcagcaagaggaaccagcaaaatggacatgacagcaattacatgttgtgaggagaacaatattcctgttgtcatctttaacatgttagagcctggtaacatgtccagagctatttgtggcgaccaagtaggtacgttagttgaccagtcaggaaggataacttaaatcacaagggcgattagctgtgttgtagcattgggacatttgtattctctcacggcagcgtgcatcttcgttgattgcatggatctttgtggatgggagagagggtaatgttcctcggagagaaggctcacaccttgatttgcatcgggtgcttgttgcgtgacatctgttgtagcggctctgccatgagaagttgtttgtttgtagtatctgtctgtaatgtgatggttagactagttgaagagcctttgtataaagtcatatttatgcctgcgtatggcgttaggtcaggtcatcagaatgttgtattgtgctctagtagtaacttgtagcgctgttgttgagctgtagtgttgtactgtattggagaaaggcatttttcttccttacgtgctcgaatgagtgatggctgtccagcaagtgtgctgtgtgatgttgtcatttcttttctcacatcaaa

SEQ ID NO: 508 - DNA, 635 bp, Triticum aestivum
ccaagtgaggtctcagactgcctttctggtaatgaaatggcttgcaccggagcagagccatacatccgtaggttcttggagcttaatattgtgcacgagctcattgccatgatgcagtcctctaccaatgacctccaggattcagcataccatgctctccatcaaatcgtgtatgcaaagggaggatcactagtcttgcagaggtttttacaactaggtactatagaataaattggtcaatctgctcgatccgtaagtgcgtcaagacaaaggacctcacgttgcaacttctggtggacattgtggcagtcggaaccaaaccctgcatacaaagaatgctctcttcccaagtcatcgagaaacttgtttcccttgagaaagcaggtgggtctttcagcgggtcagtgtcaagatatatccacggattgaacatgtgcgagaatatccagtctgctgagagagcagtgatgaagcagcatattttgaggaaagtgagatcggcggtgagagggcatgatctggagacgagtctaattgcttctgtggaggtctgcgtttctgaaggcacaaaaggagccagcagtagcaggagaaacaagtagcattatgctgcaaacttcagtacttgaaacata

SEQ ID NO: 509 - DNA, 628 bp, Triticum aestivum
catccccggcgcgtcggtgaccatcacggccacccaacctctgcccgcccaactacgcgctgcccaacgacgacggcggctggtgcaacccgccgcggcagcacttcgacatggccgagccggcatggctcaacatcggcgtctaccgcggcggcatcgtgccggtgctctaccagcgcgtgccctgcgccaagaagggcggcgtcaggttcaccgtcaacggccacgactacttcgagctcgtgctcgtcagcaacgtcggcggcgtgggctccatccggtccgtgtccatcaaggggtccaggaccgggtggatgcccatgtccaggaattggggggtcaactggcagtccaacgcgctgctcaccggccagagcctctcgttccaggtcaccagcaccgacggccagacgctcaccttccccaacgccgcgcccgccggctggggcttcggccagaccttcgccaccaacaagcagttctcttaagagacgatcataagtacgagtggtttattaatttatactccagcctttttgtgggggatgtatgtctttgatcagtgatcggtgtgtcgatcggtgtgaacgttcggtcatcggtgtgtcgatcgcggtgatatcttcgc

SEQ ID NO: 510 - DNA, 606 bp, Triticum aestivum
catttggtgtaggagtacctagagatcagcagccttgaccgtgcactgttgggctctaacagcgatcctgctaattttacatggagcgtaagatcttccatatgcatcggtgttgccagaggtcttgcgtacctgcatgaagagatcccatcaccgatcgtgcaacagggatatcaaggctagcaatatactcatcgacaaaaattacgtccccaagatcggggacttcggtctggccaaactatttccggacaatatcacccacatctagtacccgagtagctggaacaacaggttaccttgcacctgaatatgcatggcatggtcaactgactaagaaagcagatatatacagcttcggggtcctcgtaatcgagatcgtcagcggcaagagtggctcgaggagcctgctggctgatgacaagtttcttctagagaaggtcagttcttgcttactatcatgtgcttctcatcacctgcctatctgtattccacgaacgaatacatgtttgtgatacagtttcagaaatcagaacaacgcagttaagttaaaagaaaaaaaaaagctgaagacatgtactgtaattcagcttatcaccttctatt

SEQ ID NO: 511 - DNA, 504 bp, Triticum aestivum
ccgtgcctacgcgcttgcatagggctgggtctgcagcgcctacaggcttcggcgtagcacaccgacccgctagctcatctccgtgctgcgctcctaacggctacgtccggcctgctagatcgcgctccagaacgggcagtgggtgtccgtgccctcggaccgcgacgccttcttcgtcaacgtcggcgactcgttgcaggtgctgaccaacgggaggttcaagagcgtgaagcacagggtggtggcctatacagctctaaagtctagggtttccatgatctactttggagggccagcgtatgactactagtaggtattgctaccattgccgcagctgctgggcgcgggagtagcagagcctgtacaaggacttcacatggggcgagtacaagaaggctgcctacaactcgaggctcggggacaacaggctggctcagttccacaggtagcctcgcctgccgcctgggcctgctcaaggagcagcttttaccaagccagctagct

SEQ ID NO: 512 - DNA, 932 bp, Triticum aestivum
gacaaaagagcaggatatgatcgaccttctaagccttaccttgtacagtcctcctgaagcatctacagattcttcaactcagagccaaaatgacagtcagcagaccgccgtgtcaaatgggtcacaattaccgccgaactatgagcctgcaacatcgaatggacaacattacccttccaaccaccaggcatatccaataaatcaggggtacactccatacaacaattatgttgcgccctgggcccaaagtgaacagagtgcacagactggagcatatccagttcagcctccacaatatacatcaacctatccggcacagccacaatatacatcaacctatccggcaccgccatgggccatgcctacaagtgccaactctgtaaatccttttcagcctgccacataccaaacgccgaatcctcctgttgcttctgttgcctcaacaccttacccggctccttcaacaccttatgcttctccactgatgcaacatgtgccatctccaaccccaagtcccagtcctatgcaacagcaaagctcttttgtttctcatgcaaacaacgcccttgccattgttccagatgctcgaacgaatggaaaccaagaccaaagaagcaccagcgacagcacccaaaccctactacatgccagacaatctgtttggtgatttgatcgatgtgaagagtttcggcgcagcaggcaagacaagcagatcgacaaatgtgcctagtccaaagggtggtggtcaacctatgatcggtggaaagaaataggtctcgcgagttcaagttagctactctgtgtcgtttggtttgtacattgctgtatatgtgttcgggtcatattggtgatattgtttaattttagttgttggtcggcatatgtgtattcttaagagatggtagagcataattgctgtaaatgatttgctt

SEQ ID NO: 513 - DNA, 1183 bp, Triticum aestivum
gagcgcgcagtccaaatggcatctggtgtcaagaccattcccgagagcgtctgtagcttcgaaccatcgctgtggaaggacttcttcattcattacaagccagagccactttcgaggtcagaagaatggatcaaggacagaacccataaactgaagggagatattcatatgttgtttgagaatcatagtaacacgatagatagaatgaacttagtggatgtaatccaacgccttggaatagaacacctctttgaggagcagatagctactgccctaagtgacatccatgaaagtgaattcaatagctcgagcctccaagagatttctctttgtttccgccttctcagggagcatggaatctgggtatctccagatgtattcaagaagttcaggggtgaagatgggacattcgatgactatgtaacaagcgatcccaagggactcttttgtctctacaatgcagcatacgttttaatccatggcgagctggaactcgaagaggccatctctttcgcaaggcatcatttggaattatgggcacccagcctcacgtccccttttgcagagcaagtcaaacgtgcacttcatgtaccactaccaaggacctataggaggctggaggcattgcgctacatgccagaattcgaactagaagcagggcacaatccaataattctagagctcgcaaagctagaatttaacctcctccgggctgtccacttgaaggagctcaaagctatctctgagtggtataatgatctttctggatacgtggaactaacttttgcccgggatcgtgtggtggagtgctacctttggggatactctttgttctatgaggaagagtatgcgcttgcacgaatgatctttgctaagttaacttttttgcacacactgttagatgacaccaagctcgcttccaacatggccgtgagctgctgccggcggtgcaacgggttatcaacttcactctcagtctgccggtgtactatggcgacaggaaagatgccttcaccttcagctcgcatcttgacgacatcatcaagagcctattcgtcaagcccatccccatctagctagctactactctgtgtgtcgtacatatagtgtttccgtgtgtgctgtgtacgtacgtgttcatgcgttgcatgcgagatgcaccccaaatgtctgaatgcatgga

SEQ ID NO: 514 - DNA, 592 bp, Triticum aestivum
acgggaaggtgaaggctgtgctgatcgcgtcgctctactcgggctactacgacaagatccggggcatgtactacgagaacccgaccaagacgggggagatcgtggcggtgtaccagccgagccacgaggagaagcaggagtacgcgtccaacgagcacaaccagaaggcgctggcggagatctacctgctcagctactgcgacaagatcgccatgagcgcctggtccaccttcggctatgtcgcctacggcttcgccggcgtcaagccctggatcctgctccggccggactggaacaaggaggtgtccgacgtcgcctgcgtccggtccacgtccgtcgagccgtgcctgcactcgccgccgatactcgggtgccgggccaagaaggaggtggacgtggcccgcgtcaagccctacgtccgacactgcgaggacgtcgggttcggcctcaagatgttcggtagctaaacaatgacatggagctataagtaaggtttttcagtttttcttcttcccccagtggattaattaggtgtttgggggatgccctcttacattcgtttcgtactgtattcataatcgttctggtacaa

SEQ ID NO: 515 - DNA, 835 bp, Triticum aestivum
gagggccagtgccgctggcgcgcgctcccgcgggccgtggacgtcgagttcgaattcgagccctggtgcttcgagcgacgctgcgtgcacgccgccgggaagctctattggcacatctgcaactcgggtcgcgtgctcgtgctagacccttccacactgcacttctcttacatgctggcgccggccgcactgtcggaccacttcagcaagtaccgcgtcggggagatgccggaggacgggcagctctgcatcgcgaccgtggagaaccagatgatgcagctctgggtgcgtggggagaccaggtggagcgacaatgggtggcatcttgagagggagatgaaccttagcaagttgtacgacgcactgccgggcgtgcccagggacaggagggccaggtcggcgagcatcatgctcaccgacatggacgccgggcgcacagggaagctgttcatccagatgctgggctatgggcgctactcgttcgatctcaagacttgcaagctggagcgcctggcgatggaggatggcaaagagtacggggaccccatcttcgcctactccctggcatggccgcctgccttcctggctgaagcgtaatggcttgacgaattttggccatttggcgttgactacgttccaagactttgttcgaagtcagctcacatgcttccatttctggtgactactcaccactgcgcctgagtgatgtcccccttccattcagcacgaattcgaaggctaccttattttctctatgaaactgttataagcaatgtcgccgccatgctatccgagcatcttttggactcgatgatgttccgaagacgcatcattt

SEQ ID NO: 516 - DNA, 616 bp, Triticum aestivum
gcgcaactacggcataacagaaggatgagttgtcctgaacttattatataccatgatttatcatcatatttttcatgttgattgggttatcaaagtactgtctattttctcattccaatttgtcactggcagattctataggcttaacaaggattattgtgtttcagcttttatagattatatacactgtagaggttatcccatatgatttacacggatttatagaacatcagtctaatttagaggctatgtgtagtgcaaaggaaacttaatctgcgccattgccctgttcttttatatatgtgtctgaactctggactgaagcaacctatgttgacaagtaatcggcacaacaatagatggacccgtgtccgcagccccatggacgatattgctctctccaacgaagaccggcaaaggactatgtctccggtggaactcaatgggtgatcgatagtggatgcaccaatcatatgaccggagaaagggagatgcttgtggagttcgttgattcactcaaggcctcttcgaacatctcttttggtgacaatagcaagggcaagcactaaaaaaaagacacatccgtgacattttgggccgaacgaattttttttct

SEQ ID NO: 517 - DNA, 415 bp, Triticum aestivum
ccggcacgtcggagctcctgttgtctattccctcgacatgcgactggagtcgaccatccagcttgccgtcccgcgtgccctacggcttccacggcaccttcgtcaccggcaaggagctcgaatcccaggcctgagccgatcgagccccgccgcgcccgcttgccgcctccacgtttcccggaggacggcaagaagcagaggaggagatggaaagaggaagttgccagagggagcctcgccttaggcataggagatccccggaatcttcccttccattccccgctgcacctgcagtcagctcatctctgttcatattcagttagctcacacttgcttcagcccacaccagtgtaattaagtagcgcttgtagtaaaacctagctgccactcatagtgtcacggggaagtgaggatt

SEQ ID NO: 518 - DNA, 645 bp, Triticum aestivum
aaacatggatgaaagctttgctatattgtggcctagctccgactgttttggctgggaaaaattgatccaggtctttttgaaatcctttatgcttcacagcatgccatcttcttttgtgctagagtaccacagatatggaaaaatttcacaaataagagcactggcgagctgagcttcctgacttctttcatgaacttcgctggttccctcgtaagagtttttaccagcatccaggagaagactccgttaagtgtacttatgggctctgtaatcggcatcgtaacaaacggtacgatcttgggtcagatagcgatgtaccaaaagcccgtgccgaagaaagggaagaaagaagagtaataaggcgcgagagtaaggacatgaggttcttcttggttggtttacaattttgctccaggctattcttggagcaagattgcgccacttacctgcagacctcacgaaacagtaggcagagaattcatgcagacttgtgtgacgatgaaaacaataggatatttctttctttttaatttttgcaagtgccgtaaaatgactgtttgtgtagttcgaattgccaccctgtttagtttactctgtgcaactgtttaatgatgctgagagaaatgtaatatccactgggcattt

SEQ ID NO: 519 - DNA, 703 bp, Triticum aestivum
ttaccacgtttcaatggcatgaatttctgtcccatgattggctagtgttctttccctaggggagcaaccagcgtcttgcatttgctcggttttactcgcaaaccaactctggtctactggacgagtccacaagtgcactagatgatacaaatgaggttcatctatacagtcagattgaagctgcagggattacatatataagtgtcggtcaccggaagacacttcacaggttccacaacaaggttttgtacatttcaaagtccgattcggcaactggcagccttcgtaattgggagttaaagcccacagaccagaaatcaattgaagaatcatccccatttgcttcataagaacttcatgcgaaccagtttaggccccttcctcaatattcttatcccacatttaacccattatggtaaatattgttgccctaccaaggatcccatctccacgagttcaacgttacaacttacaaactggagctggactgttggcgaggttgatcttacagctggactgacaaaattgtggcagtgctactaaccaacctgatagcaggatacgttctaggacttggaataatctcacctttttgtttatgtttatgcttcattgtttagaatgaaatataacatatgtttatgtacggttgatattgcgcgctgttaccaacattttaatttttattatctgaattttctct

SEQ ID NO: 520 - DNA, 684 bp, Triticum aestivum
ctcctgccatggtcacgttaagcttgggccaagattctggtactgaacagcaagatggtgaactttgggaagaagttggatggcagatcaagtagaagaatggaaagggtactatattaattacaaattgatgaagaaattgttaaagcatacgttcaacagacccaaattggtggcaaagattgtgagcaagttcttaaggagttctcgaggattcttgatgatcagattgaaaggatcgtgctctttctgctgcaacaacaaggccacctctctagaaggatcgaggaattgggagcacagcgtgctgctattatgcaacaggttgatacatcaagagttttccaacttcgtgaggattacagagaagttggaagagatctcgtaaagcttctccgctttgttgacatgaatgctaccggtctaaggaagatactgaagaaatttgataagcggtttggctataagtttacagattattatgtcaccactcgttcaaaccatccttattcgcagcttcagcaagtctttaagcaagtgggaattgtagccgttgcaggtgctttatcacgcaaccttgcatatctggaacatgagcatcgaggaagctttttatccatatatgataatccatcagttgtactgcaggaccctatcatagaccaggtaaaccatgcagtacag

SEQ ID NO: 521 - DNA, 670 bp, Triticum aestivum
gcaaggatagctgatcttgttacagataatctaggtggacctgtgaaggatgcaaatgctatgcttgcaagtgttggagacaagtactcagctgagaacctcactacatactagcttctgccaattggctgcattaaattagggttgtctcgtcaccgtgccctacttttcaagattcttgctgatagtgttggcattccatgcaaacttgtcaaagggagtaattacactggtgatgaggatgatgctgttaacataataaaggtggacaaagaaagggagtttttggtagatctgatggctgctcctggtgctcttattccagcagatgtcttaagttggaagggcagttcgtcaaattctaaccataaacttggccagaaatctggactgaatcaaatggctgggtcatcaagtaccatttatcctactctgggtgccatgcattgccacttgaacataaaggtaaccagctacctttgttaaacagcggtgattggatatcggccagtcaatctggatacgagaaagaggcggccataacacattcacaacctcttccagtggtacaccatctgttactgctgcagatgtttttgatggttcttggacattagttcctcatgcgcaatcggacgagccgtctacttctgctggtacatcgtcacag

SEQ ID NO: 522 - DNA, 623 bp, Triticum aestivum
  misc_feature (111)..(111): n = any nucleotide
cagattgtggatatgtcaaagaaacacatccgtggattgcctcttgatactatatgcaagtggatctggtggactgcctggagaggcttcccactgaacaggtgttgatgnttgttagcttggactggacggttgatatgctgaggggaggaaaagattgggatctaacatagcggttcaagggaatgttgaccctggcgttctttttgggtcaaaagagttcataagcaagcggatttttgacactgtgcagaaagctggtaatagtgggcatgtattgaaccttggtcatggcattaaggtaggcactcctgaggaaaatgttgcccatttctttgaggttgcaaaagggatcagatactgaaatacctaggctattcgatgcattcctttctccctagtccccaccggcagaagttgtagattctgctgcttgaggatagatgcaggaagccatgtctagcgtagaatacctgaagagcacatcttttgcgatttctgtgttttgcgatcaaatttttattttattgttagtcttgtaaggttatcacttgaggtgtaagaaagttcctacttgtttatagcaagtatatattctaatcaaatctgtaaccccgagatta

SEQ ID NO: 523 - DNA, 619 bp, Triticum aestivum
  misc_feature (293)..(293): n = any nucleotide
  misc_feature (558)..(558): n = any nucleotide
tagagaaggcgaaaattcataagatacacggagagggttgagaaacctggcaatattcctacaggacaggcgtaacaagaagagagacatcggtccctatggattgagcgcatcaatgctggtacacgactgcatggggtgaattatgcaacttcatgcatggattgatgaaggagaacatccaactgaacaggaaggtgctctcggagctgtcaatgcatgagccatacagcttcaaggcacttgttgatgtatctcgcactgcatttccggggaacaggccacctgcccanaaggaaggtctagcagctattctgtgaaacagcttgtccataaatcacactgctgccatgacggtcttccgttttcccttcgttgcaactgaaagttattaccagtccaccatatcttgtattcgggaggtgactcatgtaatctctttttgccattccctgtggtattctctttagcaggaacaccttttcattgaattattgctcatttggccccttttctgttggtcttatagagagaggtctctgtgttacaagttaccantgttgattgttaattctgtagcatatgatagagatcggtgacccttgtgttgtgctcatct

SEQ ID NO: 524 - DNA, 592 bp, Triticum aestivum
  misc_feature (10)..(10): n = any nucleotide
ccgcagcacnctcccgcgcggccgcaccacctcttcgacggcgacggcatgctgcactccctgctcctcccgacggcgcccgactccgaccccgtcctctgctcccgctacgtgcagacgtacaagtacatcgtggagcgcacgccggcgagccggtcttgcccacgtcttctccgggttccatggcctggccgggatggcgcgcggcgccgtcacggcgccagggtgctgacaggccagatgaacccgatggagggcgtggggctcgccaacaccagcctcgccgtcttcggcggccgcctctacgcgctcggcgagtcggacctcccgtacgccgtgcgcgtcgacccggccaccggtgaggtgaccacgctcggcaggtgcgacttcggtggccgcctcagcatgggcatgaccgcgcaccccaagaaggaccccatcactggcgagctcttcgcgttccgctacggccccatgccaccgttcgtcacctacttcaggttcgacccggcagggaacaagggcgccgacgtgcccatcttctccgtcaagcagccgtcattcctgcacgacttcgccgtgacggagcatt

SEQ ID NO: 525 - DNA, 567 bp, Triticum aestivum
gcggcgaagggagcgcacggcgccagatctgcggacgggcggcggccacggctcctcccctcccttccccggtggcgacgggagcgcgcgggctgcggatccggcgggcgggcgggtgacgacggcacgcgccgtctccgcctagatccggtggccggccgccctgcccccgccacggatccggcgctggagccggcgggaggcggcgccgccgccgacgacaacgatgacgaggcgggagcggcgacgccaccaccgccgccgacgaggctagagcggcggcgacgacccaatctagggttttctgtttttttttgaaatcttaatttttttttggttttttgtttttccgtgcgggcggcataagccaccggcaagagaaaatcgtgattttcccaagcgatttgttccagacgggccgaggctccgcatgcaaaaatccgatcgaccgcacgaaaaaacgctttgtgtagtagtgtatgcgtggtgtgtgtgtgtcaagtgctaagcaatcacactcttgttttttggtctgaagtgattatttggttttatataaaatcttcc

SEQ ID NO: 526 - DNA, 562 bp, Triticum aestivum
ctttcccgggtctagttggtctttccggcatccaaatcagacacctcagacatctcaaggagtcacggttgattctggagtgcctggccaacacgacagactgggagcaagcaacaaagaatcacccgaataggccgagactcatgttgcacagaagtggtgttcagtggaaagcgagggtccggggaatgaagaggcttcagctgtgagggagaagcggaaaatatgtgtagtccaaccaagtttggatgatggactcgattctagtctcaagaagatgagactttcatcagactcttcttcgcggcttcaagtgattgtccaatcaacttcctcatctggtcactgaggcagacggcaatgatgattcagcgaagcaagctgctatggtgatgattcagcttggatacccgaaccagagacagaataaatgacgagctgccgttgtatcgtatggtctgtagttttacttctggtgacaagttttgtctcaatttcttgtctatatgctcatggttttctattgttgcaagttaaccatgttgcaattgcaagataatct

SEQ ID NO: 527 - DNA, 520 bp, Triticum aestivum
agcacagaccctcaccccagcagaaggtggcctggcgaagcagctcaacctccgccgcgccagtggatgttggttccagaaccgcagggccaggacgaagctgaagcatgacggaggtggactgcgagtacctgaagcgctgctgcgagacgctgacggaggagaaccggcggctgcagaaggagctggcggagctgcgcgcgctcaagacagtgcacccctgctacatgcacctcccggcgaccacccgcgccatgtgcccctcctgcgagcgcgtcgcctccaactccgccccaggcgcccgcaggccggggcgcccggctcaggcgccggcattgcttcgccggccgctccggagcagaacaggccctcgtcgttcgccgcgctgttctcgtcggccaggagcttcccgctggccgccccccagccgcaacctccattgccggcgccgtcgagctcgtgacttcgccggccggcgaagggagggcctgcttgtaaatacgcccacccctaatatttt

SEQ ID NO: 528 - DNA, 381 bp, Triticum aestivum
tatgatccttttgactttgagacagccaatgtatcatttaactgcttctccaattgtgaagacctactacccacccttgtgctaccgaggggggttgatgctagttcatttccggcatcctcttggcgtttggtgcgccttggaggagcaaggtattacaagccaaccaaagggttgctccaagctggtttttgctcaaaggacaagtatcttttgaagtggacaatatctcttggcaaaaggacaagttaaaaatggcacccatgctgccacaaaatcttcctccatgacatctaatgtgaacccccagattccacctgctgtttctagagaagtaaagcccattacgaaccaggtcgcaccagaaattagatctgcgaa

SEQ ID NO: 529 - DNA, 1418 bp, Triticum aestivum
tcaggactcctccccgcatctggagccgctttctcctcgcgagtcaaacctttctctcctcctccctcccctagatcggggagatggagccggctaccatggcctggacgctggcggcggcgggtttcgcgctggtgtactggttcgtgtgggtgatgggcgccgcggaggtgcaggggaagcgcgccgtcgacctccagatgggatccatcgccgacgacaaggtcggggacaggtattcccagtactggtccttcttccgcagccccaaggagacggccgccgcggccaccgctgacaaggtgccggccttcgtcgacaccttctacaacctggtcaccgacatctacgagtggggctggggccagtcgttccacttctcgccctctctgcccggccggtcgcaccgggaggcgacgcgggtgcacgaggagcgcgtggccgacctgctcgaggcgcgccccgggaagcgcctgctcgacgtcggctgcggcgtcggcgggcccatgcgcgccatcgcggcgcactccggctccgacgtcgtcgggattaccatcaacgagtaccaggtcaaccgcgcccgctcgcacaaccgcaaggccggcctggacgcgcaatgcgaggtggtgtgcggcaacttcatggccatgccgttcccggacgcctccttcgacggcgcctactccatcgaggccacctgccacgcgcccaggctgcaggacgtctacggcgaggtgttccgcgtgctcaagccagggggcctctacgtctcctacgagtgggtcacccaccccgctgtaccgcgccgacgacccggagcacgtcgaggccatccacggcatcgagcgcggcgacgccctcccgggcctgcgccggcaggacgagatcgccgtcgtcgctaaggaggtcggcttcgatgtcgtcaaggagctggacctggcgctgccgccggcgctcccctggtggacgcggctcaagatggggcgcctctcctactggcgcaactcgctggtgatccgtgcgctcaccctgctgcgcgtggcgcccaagggcgtctccgaggtgcacgagatgctgtacgagacggcgcatcacctcacccgcggcggcgagactggcatcttcaccccaatgcacatggtgctgctccgcaagccggccaccgccgctgaatagacagtagcatcacatgcgcaagaatgcagcagcgagtcctagctcttgccgcgggcagctaggagcggaatcagacgaggaaaagcagctcttggttttgatcttagcatggatgaattcttctgttcttagacattcttcttgttcttagactgagactggttaattagttccggggagctcggtatcacccgaagtccccactttatattttccctgtttattaatatgtggaagaatcg

SEQ ID NO: 530 - DNA, 1135 bp, Triticum aestivum
acaggactactggggcctgttccgggaggagacgggctggtacaacgagatcttcctcagcgccgtcgtgccgggcggcggcggctggtggcgggcgctgccgcacccgctccgctcctggctgcgcaactgcatcggcggctacctcctctacttcgccaccggcttcctctggtgcttcgtcatctactactggaagcgcaacgcctacatccccaaagatgctgtccctacagtagaagctatgaagaagcaaataattgttgcatcaaaggctatgcctttctactgtgctcttccgtccgtatctgagcacatgattgagagtggatggacacggtgtttctttcatatcagcgaagttggttggcctatgtacattatctatgtgtctctatatctcatctttgtggagttcggaatttactggatgcacagagagttgcatgacataaagccactatacaagcacctacatgcaacccaccacatttacaacaaggagaataccctatcaccatttgctggactagcattccatccattggacgggatactgcaagccatatcgcacgtgattgctctgttccttctcccgatgcacttcaggacgcacattgctctcctattcatagaggcggtgtggacggcaaacatccacgactgcatccacggcaagatctggccggtgatgggcgccggctaccacaccatccaccacacgacgtaccggcacaactatggccactacaccgtgtggatggactggctgtttggcaccctccgcgagccggaggatctcctcaagaaggactgagctcgtgcgtgcgagcgcggtctttccgtctctgtagcaatgtgaagtgtagtagaaagtgttgaggcttaaccctcccatctgtttattctgctgaaagatgtttgttgtgtgtttacgacagttagcggtgtgctgtttgagtctcagtctggtaggtggaaataataaggttgtctatttagctttgttcctctgggatgcggtgaaatcaaggggcttgtacccttttcggcagcatgatgggtttgtttgttgttatatacatagggcttgatgctgtttctgctcccagagtccatagtggtttggagaaaa

SEQ ID NO: 531 - DNA, 1001 bp, Triticum aestivum
cgcgttccaggagcgcgtcaagatccccgacgacaagatgcgctactacgaggagcgcgccgagatgtacgtcggcgacgacgtgtcccccgacttctacggctgggtgttccccaagtgtgaccacgtcgccgtcggcaccggcaccgtcacccataaggccgacatcaagaagttccaggccgctacccgcctccgcgccaaggacaagatcgagggcggcaagatcatccgcgtcgaggctcaccccatccccgagcaccccaggcccaaaagggtgtcggggcgggtgacgctggtgggcgacgcggcggggtacgtgacaaagtgctccggcgaggggatctacttcgcggcgaagagcgggcggatgtgcgcggaggcgatcgtggccgggtcggcgaacgggacgcggctggtggacgagagcgacctgcgcaagtacctggcggagttcgaccggctctactggccgacgtacaaggtgctggacatcctgcagaaggtgttctaccgctccaacgcggcgcgggaggcgttcgtggagatgtgcgccgacgactacgtgcagcggatgaccttcgacagctacctctacaagcgcgtcgtgccgggcaaccccatcgaggacatcaagctcgccgtcaacaccatcggcagcctcgtcagggccaccgcgctgcgccgggagatggggaagctcaccttgtgatcgccgacccgccggaaacgttcctgacagcctgcttgggtcgctcgaagctgcggcggatcggtcggtatagcagagatccgcggctgatcgaacggatttgaggcagaggagatgagaataaggtaatggcgtcgatcgagaggtcgtgtcttggtcgatcctgtccggttttcttgtagtacaacgtacgcatgcacggtgatgttcagagcttcagagcagttcgtctggattgttgaagcacgccaatattcgatatgtgaatgaatgtagtataaactaaagg

SEQ ID NO: 532 - DNA, 1383 bp, Triticum aestivum
gggaaacccattactatgtggatcaccattgaacaatctgtgtggtggacagcgagcaagacgattgtcagtcgctatcataatcgtcattgtcgctgcagcgctcatacttattggggtctgcattgtctgtgctatgaacattagggcctatacaatgaggagtaaggaggagcaggaagggaaggaggacgaagaggtgctggtctccgagagcatatcagtcggatctctaggccaaaatgccatcattggtaagttggtgctcttcaccaagagcctgccttcaaggtatgaagattgggaggaaggaaccaaggcactggttgacaaagactgccttgttggtggagggtcagttggcacggtgtacaaggccacctttgagaatgggttgtccattgccgtgaagaaactggagacactcggaagtttgacaaaccaggatgagtttgagcatgagatggggcagcttggtaacctcaaccaccccaatctggtcacatttcagggttattactggtcgtcctcgatgcagttgatcctgtcggagttcgtgaccaaagggagcttgtatgatcacctgcatgggaaccgtcgtcgtgcattttccagaagtagcagcggaggtgagctctcctgggatcggaggtttagggttgcacttggaacggcgcgtgcacttgcatatcttcaccatgactggcgaccacaagtcttgcatctcaacatcaagtcttcaaacataatgatagatgaagaatatgaagccaagctgtctgactatggatttaaaaagctgctgcctattctaggtagctttgaagtgagcagatcttatgctgccatcgggtacattgccccggagctagcatccccgagcttgagatacagcgataagagtgatgtatttagcttcggggtggtgttgcttgagattgtgacagggcggaagccagtggagagccctggggctgctatacatgtgattttgcgcgactatgtcagagagatactggaggatggtactaaatcggactgcttcgatcggagcctgaggggattcattgaagccgagttggtccaagtgctcaaactaggcctggtatgcacttccaacacaccatcaagccgaccaagcatggcggaggtggtgcaattcttggaatctgttaggactaattcttgatgttctgctatctggaacatagtagcagaataggatgttaaaacaggaaaagggttttctgattttatttttttaacagatgaagatcacatttcttctttaattctttattattattgtggccccagtccttttgtaaatgtgtttagatttgactgctcagtatctatagtttttttagatcatctgcagga

SEQ ID NO: 533 - DNA, 922 bp, Triticum aestivum
cgccgtcgtcgatggagacgatcctggaggagtagcggatggtgcccgtcggcagctccgccgccaggacctgcagcagcacgtcgcgcctgacgcagcggaactcgtccctgaaatccaccttctttgctatctcacccgtggacgccgacatgacgcgcagcccctcgatgtgcaggtggagcttcctgatctcgtcgccgacgccaagggcgtcgagcgcgcggaaggcgttgggccacgtggcgaaggcgaaccccgaggcccggagcgccggggacgactccagcaccaggctcctcaccccttgttctgtgcagcccgagcgcggcggcgaggccggcgagcccggcgcccacgatcacgatgtcctcgccggactcctcttgccgctgcatgcttgccgccgctgcggagagcaacgaggtcgaggccacgtaatcggcggactttcggaagagagcgcctgatttgtttaacacgaatcaaccaatctagctagagctgctcatcgggattggagtatatacagctcgacagtgaacggagcttgaggattgacgtcattgctgattatatgtaggatttttgtcgttgccatgaatggcgtgcgctaggctcactcgtcacagtcgctcgtggtgggtgcccaagctgaatttgccggaaaagaacagctcgcagtacagcaaacaaacatgtgacgggaaattccgctgctccctatcacacactccacctctatctagtcgataggctgcgggagccacactgattggcccggctactttctaggccacgattttcgagcatggcgttttttatctcggcctcgatggaggctgaatttttgaaaaagataaaaaaaattagtttaaaaagaaactggaaaaattgtacaagtagaaagaatgtgaagtgt

SEQ ID NO: 534 - DNA, 956 bp, Triticum aestivum
gtggagtctgtgtcaaatcaatgtggaaacaaggagtctttactggtatcttcggatgtaagccagaagggtgctttacattcttcttcaactgcctccaaccttggtactcatgtcagagcacatggcgttgatgatcttatggaagaagttaatgctaatgaggtatcatttgagagccgttatggggtgcaatctagccatccaaatcattatggtgaccagctgcatccaggccacacattgcagtttggccaacacatgccatccgcagagcaatctaggggagtcgagtgggtgtatccgactatatatcaggatgatcaagtgccttatggcaggcggacatcttgaatgctagaacaggagaatgatttcaggttcctgatgatgagatgtacagaggggtccgggaagctgccagttggcgtcggccctcacactaggatgtgttagcttcatccatctaacatctgaggcgaggcggcatgatgagagcgcgtgtcagcacaaggctgggcatgcggtttgattctttcgcctgcatagagacggcaggaatgtggcaatgtgacatggctgaccttgatggtgctggcaactgctaaaatgtactccctctgtaaaaaaatataagacattttaagtcactactttagtgacctaaaacgtcttatatttgtttacggaggaagtagtagtgtattgtgcctgatcctgacaagtgacaataactaaatatagctctcttgagatcctgctctcttttgacggctggccctgacctatgtgaatacatcgttggattttttcttttctccctgaaagaacaccgtcgtttttctctcgcttaaatgtgatacggtgctgctgcgtctctgtatatgttttgaaggtcatcagataaaatgaaatacgccagagtgagagcatcactcacaacccaagcccaaacg

SEQ ID NO: 535 - DNA, 730 bp, Triticum aestivum
ccggcgacgcgcggccagccctgaattgaatcagctaccatggcggccttgccgttagccacggcggaagtctgcgacgccaactcgcacctcatcaccggcggcgagctgcgcgcgctgcagcccatcttccagatctacgggaggcggcaagtgttcgcgggccccatcgtgacgctcaaggtgttcgaggacaacgtgctggtgcgcgagttcctggaggagaagggccagggcagggtgctggtggtggacggcggcggcagcctgcggtgcgccatcctgggcggcaaccccgtccagcaggcgcagaacaacgggtgggcgggcatcgtggtgaacgggtgcatccgggacgtggacgagatcaacgggtgcgacatcggcgtgcgcgccctcgcctcgcaccccatgaaggccaacaagaaggggatgggcgagaagcacgtcccggtcaccatcgcgggcaccaggatctgcgacggcgagtggctctacgccgacaccgacggcatcctcgtctccaggaccgagctcatcgtgtaggagaggctgacgcctcgttggccgtgttgttccactctgtggttgtatttgcttgtctgtaacatgatggatgaactgggctctgcataagagaggagggtgcttgctgttgctgcctctgccctcccttattgaatgatgttgtatctgaacttcagattcagaagcctgtaataatagtcat

SEQ ID NO: 536 - DNA, 733 bp, Triticum aestivum
ccccacgcgggaggcgagaccgaccggcgacgcgcggccagccctgaattgaatcagctaccatggcggccttgccattggctacagctgaagtctgcgacgccaactcgcacctcatcaccggcggcgagctgcgcgcgctgcagcccgtcttccagatctacgggaggcggcaggtcttcgcgggccccatcgtgacgctcaaggtgttcgaggacaacgtgctcgtccgcgagttcctggaggagaagggccagggcagggtgctggtggtggacggcggcggcagcctgcggtgcgccatcctgggcggcaaccccgtccagcaggcgcagaacaacgggtgggcggggatcgtggtgaacgggtgcatccgggacgtggacgagatcaacgggtgcgacatcggcgtgcgcgccctcgcctcgcaccccatgaaggccaacaagaaggggatgggcgagaagcacgtcccggtcaccatcgcgggcaccaggatctgcgacggcgagtggctctacgccgacaccgacggcatcctcgtctccaggaccgagctcatcgtgtaggagaggccgccgcctcgttgtccgtgttgttccactatgtggttgtagttgcttgaattgaatgatgttgtatctcaacttgagattcagaagctctgaacttgtaataactgtaagcttaaattgcctgatcaaatggaatgaggaatgggaataaaattatc

SEQ ID NO: 537 - DNA, 947 bp, Triticum aestivum
  misc_feature (223)..(223): n = any nucleotide
tgtgtgagatgaccggcgtattgccgtggaagaagaaatcatcggacaatcctcaaacgcagattgtcttgcagaactctaatcaagcagaacaggaggataaagttccgaaatttgtgcagatttcaccggaaacatatgcacatcttactgattctgaagaacaagtgaaagtcttggatgaaaaggtgaaaaccttgaatgagaaactgtctgcatcacnatctgagatcactaccaagatgccctagtgaaacacatgctaaagttgctgaagaagctgtatcaggttgggagaaagctgaagcggaggcctcggcactgaaggttcagctagaaactgttacattgtctaagctagcagctgaggaaagagctgcccatctggatggtgctctaaaggaatgcatgaagcaagtaagaactgtgaaggaagaaggcgagcagaagctacatgatgtagtttttgcgaaaaccaaacagtgggagaagataaaggccgagttggaagaaaagttgcttgaatttgaccatgagctcataagggctggtgctgagaatgatgcactctcaagatcactccaagagcgggcagatttgttgatgaaaattgatgaggaaaaggctcaagcagaagctgaaattgaagtcttgaaaagcacaattcagtcaggtgaaagggaaataaattcactgaagtatgaagtacatgttgtcaccaaagagcttgaaatccgcaatgaagaaaagaacatgagtgtgcgctcagctgatgtagcaactaaacagcacctggaggatgttaagaaaatcacaaagctggaagctgaatgccaaagattgcgtggtcttgttcggaaaaagttaccaggccctgctgcattagctcagatgaaaatggaagttgagagcctgggaatgggcagagattatggagacaacagatt

SEQ ID NO: 538 - DNA, 673 bp, Triticum aestivum
ccaatagtcctaggaatcgctagaggactatcctacttgcatcagagtttcgcgagtgcatcatacactgtgatattaagccagagaacatactgctcgatgcatcattttttcctaaaattgcagactttgggatgccagcttttgtgggcaggaattttagccaagtcttgactacattcagaggaactgtgggttatcttgccccagaatggcttagcggagttgctgtcacacccaaagttgatgtttacagctttggcatggtactgtttgagatcatatcaggaaggagaaatttacctgaagcatgtactggcagcggtgctggcgatcgtgttgaatatttccctgtgcaagtcatcagcaagctttgcgggggagatatgcagagtttggttgatccacaactacatggtgactttgatttgaaacaggctgagagggtttgcaaagtggcattatggtgcatccaagatgacgagtctgatcgaccgacgatgggtgaagtggtacgggttctcgaggggctccaggagatcgacatgcttccgatgccaaagctacttgcagctataactggacgccctaatgcaacttcagtgtaatgatctagaaatgtaactgcaaacaatgttgtactaatatttgtttgttttagcaaatcttgaag

SEQ ID NO: 539 - DNA, 565 bp, Triticum aestivum
gaccccgcgccgacgccttcggtcgtcaacatcggcgacaccttcatggcgctctcgaacgggaggtacaagagctgcctccccgcgcagtcgtgaacagccagggtccccaggaagtcgctggccttcttcctctgcccggagatggacaaggtggtggcgccgccggggacgctggtggacgcctccaacccgcgcgcctacccggacttcacgtggcggtcgctgctggacttcacgcagaagcactaccgggcggacatgaagaccctcgaggtcttctcctcgtggatcgtccagcagcagcagggccagctcgccctccagccagccatgacatgaaggattgaacctaccagacagaggatggagctctctgctctgctctaatctgtattgctcctcccattagccattgattcagcttagctgctgagactgagaaaagagaaacgtcgtccgtcgatcgaatgttattattacagcttaattggttgatctagtgatagcacgtacgcgcgtaccagaagcatggatgaatttcctagatgataatttcctaaga

SEQ ID NO: 540 - DNA, 407 bp, Triticum aestivum
ccccacggcgcaaaggagcacagaaggtccattccgaagctcggcgaaacagctgggctcacaaggcaggaataccacctcaccgccaaagatgggaacctgcagagccaacatatgctgctcaatggcaatgtgctggcaactggtgccaatggagccatccccaagctggagcctgtgcaggttgagggaacagagcccataaccgtggccccttactccattgtctttgctcatattccaggcttttatgctcctgcatgtaggtaaattgttgattggtttttttgggaaattattccgttatcgtaggttagaggaagtgctggtgggtgagaagcatagcatgctcacctgcaaatgaagtaagctgtaaggctgcatgtttgtgattcatcattgttttc

SEQ ID NO: 541 - DNA, 615 bp, Triticum aestivum
atgatgaggacgtcaaattgttgttggcaagagtctagatcaaatagttctggatgagtcaaaggatgttcttttggaggtatatgcaccatggtgtgggcattgtcagtcactggagcctatctacaacaagttgggcaagtatctccgtggcatcgactcccttgtaatagccaaaatggacggcacaaacaatgagcatcctcgtgccaagcctgatggattccccacgatactcttctacccagctgggaagaaaagctttgagcctataactttcgagggtgaccggacggtggtggagatgtacaagttcctcaagaagcacgccgccatcccgttcaagctgaagcgcccggactcgtcagcagcacggaccgacggctcaggctcaacgactgagggcgagaagagctccggctcgaacccgaaggacgagttgtaggggattagatacaccattgacaacaagtacgaggaggcgccgatgatgtcgaaatcgggagattgagaaggaatggctaagctaggtatcaatcaaccttggctgctgcaagtgtatgctgagaacacaaatacgtattaactactgtagaatccaatgaataaaagcaa

SEQ ID NO: 542 - DNA, 1811 bp, Triticum aestivum
cacacgagctgggtcattcaaattcaaatcatatatctgagttgagcccgagggtgtcctcggccactctcgcgtcgatctgctatggggttagttagtcgtccgccgtgaggaaatgtaacagcaagatgctcctcggcggcggctcttcatctccgtgtggtgtgcgcggcaaggaacaaccattgacccccggcaagcacaacgcggtcgaggaagaagcgcttctaggaggaagaagaagtccagcaagaagttcagctgcgtcccctgcgtcagcctcaccgagctcaccaggcgcgccgagtgcgaggccatcgccgacctcgtcaacaacatctcggccaagtcagacattaccagtcacatgtacgcggccgaggagatcctgcggatcaccaaccagaacatccccagcagggtgctcaccttccgtgagttgtccgcggcgaccaacaacttcagccccaacaaccttgtgggcgagggcggcttcgggatggtgtacaaggggcacttcaaggacaccaaggaggatatcgccgtgaagcggctggacaaggaagggttccaggggaaccgcgagttcctggtggaggtgctgatgctgagcctcctgagccaccccaacctcgtgaatctgatcggctacagcaccgacctcgaccagcggatcctcgtctacgagtacatgcccaacggctcgctggaggatcatctcctagatctcccggagaacgccaaggcgctcccctggcagacgcggatgaggatcgcggtgggcgcggccaagggcatcgaatacctgcacgaggtggccaaccctccggtcatctaccgggacctcaaggcctccaacatcctcctggacaaggacttcaactccaagctctccgacttcgggctcgccaagctcggccccctcggcgacgagagccacgtcagcaccagggtgatgggcacctacggctactgcgcccccgagtacgccatgaccggcaagctcaccaagatgtccgacatctacagcttcggcgtcgtgctgctcgagctcatcaccggcaggcgggccatcgaccccaccaagcccacggaggagcaggttctcatccactgggcggcacctctgatcagggacaggaaaatgttcgtgaggctggcggatccgttgctggggaaggacttcccggtgaagggggctgtaccaggcgctcgccatcgcatccatgtgcatgcaggaggatcccagcaagaggcccaagatcggcgacgtcgtggacgcgctcaccttcctcgccgaacagaaatactatcctcaacgagaccgggaagctgctcaggcgaagggcggggactgcagcactcctcccaaaaaggacatggtttctgagatcaaagccgatgatgacatgaagcagagatgagccagacaaccataggatataatattataagagatgcataagggaggagatgcagcagaactatatctctgccccctcacatttcttgtgtaccgtacaccacataggcaggatgtaagagcagcaacgaatcatcttgacttgatgatgctgatttgttagtcaaggcctcaaattccagcagcaaaagccaagagctgagccgtctattcctgagctgttccaaggactgccacgttcaatattagcttctagatcaacatatatgcaaccgccatccttttccatcattctggtcttcatgtaatctaaaatctatgtgaggaggatttgcggaattgataaccctagtagaacactcaaaaaataaaaggtatttgaagttgc

SEQ ID NO: 543 - DNA, 629 bp, Triticum aestivum
cgcgtgtgcccggggtccgcgggtgctacgtgagcgctacgcgcgcgcgcgcgctacgtgtgtgcgcggctacggcagcgtgcggcagctacgcgcgtgcgttatggagtgtgtcgcgcggccgctacggagaggcggcggcggcgccgtgagtgctacaagtgcggcgaggagggccacatctccagggactgcccccagggcggcggcggcgcgtggcggtggctacggaggtggtggcggccgtggcggtggtggtggcggtggcggctgcttctcctgcggcgagtccggccacttctcgcgcgagtgccccaacaagaccaactagacggctttgcccgtcagatctgagtgccccgttccccttcgctccttttcctaccgcctgactctgcagcaagtcatacctatacctatcagtattagtatatgtcgccgtagtgttccccgtgcttctcgtaggaagaagaatcgacgatgcgagcttggttccagaagtattgttggtggcgtgttgttcgtttgaagttatcttgtgtcgtctgatggggacagaccttatatctttatgtattggattgaatggactaagttatgcaagtcaagttatgctgtctgattttgat

SEQ ID NO: 544 - DNA, 372 bp, Triticum aestivum
tggatgtcaatgggggctgctgcggtaacgggtaccatgggtgccgctgctgtgcgcgcgcggacgaggtcccggagcccatgtaccgcgcggaggtccgcaactgagcacacgaggtgcagccatacgtaacgtacctacgcgtgtgtgcaactcgtgacgttgctctgcgcacgtatagtaagttgctggtaaatatggtctctgataaataaactgcgtacgtataccggtatacgtacgagagcccgtttgcactttgcacagtgatcttggagaacacacccctctgtgttcttgtatgtattaataccccactctatatgtgttctccgtgtactgtatgtatcaatttccatgtttactgttacc

SEQ ID NO: 545 - DNA, 681 bp, Triticum aestivum
ttgttcgcttacgccatacgccaccacgccaacgtgcggtgccgtgcggcggctcctccgcctcgccggtcgtgctccgccgcgtcgccaagcgccagtggactacatccttggcgacaacccgctgcgcatgtcgtacatggtggggtacggggagcggttcccgcggcggatccaccaccgcggcagctcgctgccgtcggtgtcggcgcacccggcccggatcggatgcaaggccggcgcggcctactacggcagcagcgcgcccaacccgaacctgctcgtgggcgccgtggtgggcgggcccagcaacaccagcgacaacttcccagacgcgcgggccgtcttccagcagtccgagcccaccacctacatcaacgccccgctgctgggcctcctcgcctacttctccgcccaccccacctgccccagtccgatggcaccgactgaagaaatgtggttgaagtggcctctttagctgtggtgggccgaggaaggaaggaagcctggttggtggtccttgttttgtatgggctgcagtgggctgattcgtcctgttgctttgctgcccctgcattattatttctactactacgtgtaacggatgccgctcctttcctgtaaaaaatggcaggaaaaggatcggtcgtgccaagacaagcaatatatctccatctacta

SEQ ID NO: 546 - DNA, 713 bp, Triticum aestivum
gacgacagccccggggacggcggcggcgggcacgggttcttcgactccaccttcgtcaagggcgcggccaggcggccaggtgggcgcagcccatcacctacctgcacgtctacgagtgcgacgccttctctattggaatattctgcttgccaacttcagccgttattcctctccatgatcatccgggaatgactgtattgagcaaaatcctgtatggttcgatgcatgtgaaatcatatgactgggtagaacctactgttctagcgagtaatcggcaagtgaaactggccaagttacatgcagatgatgttcttactgctccatgtccaactaccgttttgtatccccaaagtggcgggaacctacactccttcacttcagttgcctcttgtgctgttcttgatgtacttgccccaccatacgctgaagatgctggtcgaatttgcacctattttaatgattatccgttttccagcttctccagtggcccgcgcaaagacagtcgatagcccagataactatgcctggattgaagccataaactcctgtgtacattaacatgcgccctggcatgtatgctggcccaaccgtacaggaccgcctatcataaccgacgaaccgaggagcatcaagacagtgtgtccgggcagcgaggcaccaatacagttcttccaatgtagcgattgtaaatgtactgtcacctgtgactatta

SEQ ID NO: 547 - DNA, 1664 bp, Triticum aestivum
gaccggtacatgaaggaaaagagtagcatcgctgtaatagtcctcagtgtacacacagcaccagtggacattgcttgaaaaacttgcttgttgcagaggaactatggccccgtgctattgtcagaactcaccagtctgaatcatatcgaagaggctgctgttctgagtacctgcatacagaatggaaatatatgtgctggctttatcgtggaaccgtggtattagagaacgtagtagactggatgtcaaagaaaagtggaatccctggcttccgagctgagggagcatctctttatgttgcgtgacagtgatgccacacgccatctgtttgaggtatccgccgggctagactctttggttcttggagaaggacaaatccttgctcaaagttaaaccagttgtcagaaatgggcaaaacagtggaggcttgggaaagaacattgataggatgttcaaggatgcaatcacagctggaaagcgcgtccgctgtgagaccaacatatcagctggtgctgtgtctgtcagttcggctgcagttgaactggccatgatgaagcttccaaagtctgaatgcttgtcagctaggatgcttttgattggtgctggcaaaatgggaaaattagtggtcaaacatttgattgccaaaggatgcaagaaggttgttgtggtgaaccgttctgtggaaagggtggatgccattcgcgaagagatgaaagatactgagattgtgtacaggccacttacagagatgtatgaagcagctgctgaagctgatgtcgtgttcacaagcaccgcatctgaatccttattattcacgaaggagcatgcagaggcgcttcctcctatttctcttgctgtgggtggtgttcggcttttcgtcgacatatctgtcccgaggaatgtcggtgcctgtgtatctgaggtggagcatgcacgggtatacaatgttgatgacttgaaagaggtggtggaagccaataaggaagaccgtgtcaggaaagcaatggaggcccaaacaatcattacccaagaactgaaacggttcgaagcatggagggattcgctggagacggttccgactatcaaaaagctgaggtcgtacgccgacaggatcagggcatcggagctcgagaagtgcctgcagaagatcggggaagacaatctcaacaagaagatgagaaggtccatcgaggagctgagcacgggcatagtgaacaagctccttcacggcccactgcagcacctgagatgcgacggcagcgacagccgcaccctggacgaaacgcttgagaacatgcacgccctcaacagaatgttcaacctcgacacggagaaggcggtccttgagcagaagatcaaggccaaggtagagaagacccaaagctgagaccaggagatacttgtccgtctgtatatttacttatactgctcccagaatgtcgctacattccaatcccagtattttttttctgatcctccacttactgctgagttcttcttgcgccgtgaattagccatggcagcctccaaatgtgttgtagagaggagcggcgaagcatgtttgctccaaaactgcctgtgtacattatttaccgtggctgctgtggttagagcccaattttcaagctgtactataatactctattggatgaaataaacaggaa

SEQ ID NO: 548 - DNA, 1546 bp, Triticum aestivum
  misc_feature (715)..(715): n = any nucleotide
gtcgaacctgttatgatgcactggcctgggaacaaactgagagagaaatctttgaaccatgtcatgcagcatgttcattatgaagatgagaacactcgatacatttgcattggtcctgtgaacaaggtattaaatatgcttgcttgctggattgaagatccaaactcagaagcattcaagctacacattccaagaatatatgattacttatgggttgctgaagatggcatgaagatgcagggttataatggcagccagctctgggacacagcttttgcagttcaagctattgcggccactgacctcattgaagagtttgctcccactcttaagctggcacatgattttattaagaactctcaggttgttgatgactgccctggagatctgagttactggtaccgtcacatatctaaaggtgcatggcccttttctacagctgatcatggttggcctatatcagattgcactgcagaaggactaaaggcctcattattgctatcaaagatttctccagaaattgtgggcgaatcggtggaagttaacagactatatgatgctgtcaattgtttgatgtcttggatgaatgaaaatggtggcttcgcaacatatgaactccaaaggtcttatgcctggcttgagcttatcaaccctgccgagacattcggagatattgtgattgattacccgtatgtggaatgtacatcagccgcanttcaggccgtgacatcatttaaaaagctctatcctgggcaccgcaggaaagatgtagataactgtatcaacaaagctgctaattacattgagaacatccaaagaagtgatgggtcatggtatggctcttgggctgtgtgcttcacctatggcacatggttcggcgtgaagggcctagtagctgcaggtcgaacatataagaccagtcctgcaatcagaaaggcatgtgactttctgttgtcaaaagagcttcctttcggtggctggggagaaagctatctgtcatctcaggatcaggtttacaccaatcttgaagggaagcatactcatgctgtcaacactggctgggccatgctgactctaattgatgcaggacaggctgagagagatccaacgcctctgcatcgagcagcgaaggttttggtaaacttacaatcagaggatggggaatttcctcagcaagagatcatgggagtcttcaacaagaactgtatgatcagttactcccagtacaggaacatcttccccatttgggcgctaggcgagtaccggtgccgagtgctgggcgcgggcaagaagtagtaccatcttccgtctctttggctgggttacgtggtggaacagtgtgtttctgtaataatgtagctaggtgcaggtggagatctggtagccgtatagattttttttttaccatttgatgagtagacgaataaaatggattgtacatctgaatatggggatacgctaccgcatgttggagaggtgtatatatctcgcttgtaggacctgtttggttggatacctgaacaccgtgcctggagaaatggactgc

SEQ ID NO: 549 - DNA, 614 bp, Triticum aestivum
ctaaaggaacaaggagcgtctagcgttggggctgcaggttattgctggggtgcaaaggtagttgcagagttagcgaaagctaatgagatccaggcagccgttatgtcgcacccttcatttgttactgtcaatgatatagaagaggtgaaatgccccatcgctatacttggagctgaaactgacgtaatgtccccaccagaattggtcaagaagttcgagcaggttctatcctctaactcagggattgctcactttgtcaagatattccctggggtttctcatggatggaccgtgagatacaaaagcgaagacgcagctgctgtgaagagcgccgaggaagccctggcggacatgattgactggttcaacaagaacctcaagtgaacctaatgaattggcggccatccttttgtaataagccagtgtcactcttcaggagtcaccacgcgagcatccacggtttatgttatggtcttagctatagcctatagggcatgcgtctttgtctgctgcaggtctgctggtatgtgtgtgcttgctcattttggggtctgcttgtgctgaacactgaaactattgcactcagataaaatgtggtatttgcagttttgtga

SEQ ID NO: 550 - DNA, 628 bp, Triticum aestivum
ttgcacgacaaagggaaagcaactattctcgagatcgaaacgaccaccagtctcaaagattctggcgaagtgttatgtatgaacaggagtactattttcttgcgtggcgctgggggtttttcggactcttcccggccgtactcgtatacgacttatcctgccaaccagatttctcgcatttctattccaaattccgcaccttctgcagtgtatgaagaccagacacaacaatcccaggcactcttatacaggttatctggggattataatcctttgcattcagaccctatggttgcacaggttgcagggttcacccgtccaatactgcacggcctctgcactctggggttcgcggcccgggcggtcatcaagtcgttctgcaacggggatccagcggcggtgcggaacatcttcggccggttcctgctgcacgtctaccccggcgagacgctggtcaccgagatgtgggtcgacggccagagggtgcagtaccagaccaaggcgaaggagcgtgaccgcgccgtgctttccggatacgtgctgctcaaacacatcccctcatcattgtaagtgctgtgaggaatatacatactttttaattcggtgctttgattagctaactgtggtg

SEQ ID NO: 551 - DNA, 859 bp, Triticum aestivum
gtcgcattgggatgatcttgttataatcatagcagtggtcagttcaaagcagaaggaaaccagtagcaccagtgggatgcgggacactgttgaaacaagccccctcttgcagtacagggcccagactgtagttccaggtcgcatattgaaaatggaagaggccatcaagaatcgtgattttgaatcctttgccaggttaacttgtgcagatagcaaccagtttcatgctgtatgtttggacacgaggtcctcccatcttctacatgaacgacacatcacacaggataatagccttgtggaaaagtggaatcactcagaaggaacaccacaggttgcctacacatttgatgctgggcctaacgctgtcttaatagcacggaaccgcaaaactggcacccttctccttcagaggcttttatacactttccccccacaggagaatgacttggacagctatatgctcggcgataaatcgatcctaagcgatgctggtttgcaatccatagccgatgtcgaggcccttccagcgcctccggagatgaaagctccaaaccaaaaattcaatggtgatgttagctacttcatctgtagcaggcctggggccggcccaaaagttctcaccgatgagagccatgccttgattgattcagccacagggcttgcgaaaggagtgtaattttggacgacgataggtttcggtaacagtctttggttgagattaatgtagaattgtcacgttgttgtacactcagtactttcgtcattttgatcttgtactgtaccttcgatcttgtactatttccatcattttgtccctgactgttgtagccgcttaaagaacatgtatatttcttcaata

SEQ ID NO: 552 - DNA, 601 bp, Triticum aestivum
ctcacctacacgcactccacctcctcgcgcccccgcgcccaagcccgccatcccgccgcctcaccaccatcgagcccgtctacgacaccgccaagaacgcctgggagttcgccgtcgccaggaagttcgacgccggggacaccgtcaggggcacctaccaggcctccaccaagcagctcgggctcgagtggaccaggagctccagcataggcggctccttcaaggttgcgacgacgttcgatctgtccgatcaaagcaaagcaccgaagctcgtagcggagagcacgtggaactatgagatctgatcgcctccgcctccgcctccgcctccgcctgccagcgagcaagcgggcagctcctgctcatagagcagcaccatgtgtcatcatactgtctactacaactcaacaggcagactgcccctctctgggtgcaccattattcggatcctattaccgctatccattttttgcttgtcgtgtgacatctgagtcgtcgctggcgatgctatgacatgaaaatgaggtttaagttaactgtcttgtgccgagaatttcacgaatggctcttgctgtttgcttggtgtgaagttttcacagat

SEQ ID NO: 553 - DNA, 711 bp, Triticum aestivum
ggatttaggagcattaccagagacggcattatcaaagagacccgagcaatattatgagcaggtatgtggagatccttgaagataatgccataaagtgcaaggctggcaactctgaatgcgagccttgggtggtcacctcctggttgcgtgatcatctactatctacccgagagagacggaacactttgttgtggaagaaggtggaagaattgctactggaagattctcgcatcgaccagtatccaaaagtgatcaagggagaggccaaagttgtcttagagtggcaagctagcgggtcgctgagtgggaagattaagaagatgcaaggtgcagcagggaagacaaggagcggcagcgttggcgccatcaaacttgctgaagaaatatgtggcagcagcatcatcagcagcagagacaaggagcattgttcttcaactagcaaagaagcaactaatcctttcatgtgatcaaccaatcaatccaatcacggtgaatacatctttgatgagtgtgtgtagatgacacgatgatcacgtagggatcttatttatgtcagcattattagttagcaatgtcgtcgatgaatgttgggtggttttgcctctgccctctgaagaacaaaacagaacagatgttgtagtaagatgatgtatatgtatgaatgaatgtagtatcattcattggaagatgctgctgacggagcactcgtcg

SEQ ID NO: 554 - DNA, 984 bp, Triticum aestivum
  misc_feature (288)..(288): n = any nucleotide
cgcgatgacatcgaggatgtgcagcggagtccagatcatgcaccacctcacgggtcaccgcaacatctcgagctcccggcgcctacgaggaccgccactcggtcaacctcatcatggagctatgtgagggcggggagctattcgaccgcatcatcgcgcgggggcactactccgagcgagccgccgccctgctctgccgcgagatggtctccgtcgtgcatagctgccactccatgggggttttccaccgggatctcaagcccgagaactttttgtttctcaacacanaggaggactcgccgctcaaggccactgactttggcctctccgtcttcttcaaacacggggagcagtttaaggatctcgttggaagtgcgtattatgttgctcctgaggttctgaagcggcactatggagcagaagctgacatatggagtgcggggattattctgtacatccttctgtctggtgttcctcctttttgggcagacaatgaggatggcatatttgaggctgtcttgcttggtcacatacttaaaacatttgaatattttgataaggaccacagcggatacataacacaatgcacatgaatagattggagaaggaagaccacatacttaaaacaattaaagatattatcgctgaagttgatacagatcatgatggaagaatcaactaccaggagttcgttgccatgatgagaaacaacagcccggagattgttccaaatcggcggcgcatgttctaattatcttctaccgtaacatcttcctggccccattatcgtccaagaataattttgagggatgtgccgctttgatgttattgtccctcatctttagatttggcgtgtatttccttgatcacatgatcggttccattgctgctccgagggtattatgatcatatgcgtactcctcctgatcatttatatggaaacaggcgttgtgtaacagttttttaatgattatgttaagcagc

SEQ ID NO: 555 - DNA, 676 bp, Triticum aestivum
atcatacactctatgatgaaacccaggattcatctgtcctggctcagctgggatggccagacatgcggctaccgatcctatacaccttgtcttggccagaccgagtctactgctccgaggtcacctggccccggctagacctttgcaagctggggtcgctgacattcaaagctcccgacaacgtgaaatacccatcggtggatctcgcgtatgcagcagggcgagcagggggcaccatgacgggagttctgagcgctgctaatgagaaggcggtggagctgttcatcgacgaaaagatcagctacctggacatcttcaaggtggtggagatgacgtgtgacgcgcaccgcaacgagctggtgacaaggccgtcgctcgaggagatcatacattatgaccagtgggcaaggaagttcgccgccaacctacagccgtcgtcgtccgggcggagccctgtgctcgcctaaggccgggcggagccctgtgctcgcctaaggcccttcttcctggagctggccggccgatgaagcacagaagatgtacactactactgccatggcctggccttgctaaaactggccatgtggaaaccaagcttagatatttcaacaaggcacacataggttgccttcctgaaatgtaaatcatgtgttcgcatgaataaatcatgtaagtt

SEQ ID NO: 556 - DNA, 622 bp, Triticum aestivum
cgtgggacgaataattactcgcatatgtcaaggtattggaatatgttggtctggctccggaaggcagccagagggtctctagtttcttagagaaggccgcggaaggtcttgttgaaggtggcaagaaggaaatcttcaccccgatgtacttctttgtggttcggaagcctctttcagaatgagcaaccttcaggcaatgcaaagatgcattttgaaggcgggctcgaccggggagtttggttatgcgatcctcggttcttatctgtagaagaagacgtagtgaaatgtgttgcgtttctgtttgttttgtatttaatgttgagcttctgttttgttgttttgtcgtgcgagcctttcgatgctcgtcgattaactgacagtttgacaccattgtgctaagctattagtggcataaataagctagatgcagttttcttccccgtcaaggtttgcatgaggccgttccgatttcttgtccaaacaagcttgtgtactgtgtaggatctggtggtgccgaagttttgtaacctagcaacgagaatttctcatgaaagatcgttccgagtactggaatttttcaagtatgtttgccgtaagaataataatttgaggggtatgtttg

SEQ ID NO: 557 - DNA, 701 bp, Triticum aestivum
ggagtgcgtcttgacgagccgccaaccatgtccccgccgggagccgggaggtgtgcatccgcggccgaacgtgacggccgggtacaagaccgccgaccccggcggcgaacgaggcggcgttcctgcacgggtggttccacacgggcgacatcggcgtgatggacggcgaggggtacgtgagcctggtggggcggatcaaggagctcatcaaccggggcggcgagaagatctcgcccatcgaggtggactcggtgctgctgggccacccggacgtggcgcaggcggtgtcgttcggcgtccccgacgagaagtacggcgaggagatccactgcgcggtgatccccagggagagcgtggcgctgggcgaggaggaggtggtggccttctgccggaagaacctggcggcgttcaaggtgcccaagaaggtgtacatcgccgccgacctgcccaagacggccaccggcaagatccagcgccgcatcgtcgcgcagcacttcttcgtcgtgcccgccgccgccgccaaggcctagaagagctcgtcggtccgtcgatcgatcacgtcgccgtcttttgtcccttttttttacgtgccagacagaacaggggattgataatgaaattgcgcgccacatgacattggagagcggtaaaagttgtggttgatttgattgatgaagattactactacacttttcaccgcc

SEQ ID NO: 558 - DNA, 1088 bp, Triticum aestivum
attcaactgggaatcaatgacattgttttggccaggtgggatggaaagcatgtctaatgctccgaaatacatcgctgaagctagaaaaggatctcgcttcggacacgacagccctcgttgatggcatgcttaaggatggcctttgggatgtatacggcgattgtgccatgggagtctgtgctgagctttgtgctgacaatcatgccctgacgagggaagaccaggatgcatatgctattcaaagtaatgagcgtggaattgctgctcgtgacagtggtgcttttgcatgggagattgttccgattgaagttcctgttggtagaggtgaaacctgcagtacttgttgacaaagatgagagcctagacagtttgacgcagccaagctgaagaagttacgaccagcattcaaggagaatgctggtactgttactgctggaaatgcttctagtataagtgatggtgctgcagcattagtattggtgagtgggaagaaggctcaagaacttggattgcaagtccttgcaaggattaagggatttgccgatgcagcccaagctcctgaactatttaccactaccccagcacttgccataccgaaggctctcacaaatgctggcctagagtcctctcgtattgatttttatgaaatcaatgaagccttttcggctgttgcacttgcaaatcaaaagcttctcggaattccttcagaaaagataaatgtacatggaggagctgtatctttaggacacccacttgggtgcagtggtgctcgcattttggtcacccttctcggtgttcttagggagaagagtggcaagatcggagttgctggtgtctgcaacggcggtggcggtgcatctgcgctcgttatggagctggcgtaaggagctctgacaccaaagatggagcctgcatgtaaaattctatgtactgtatttcatagtgctgtgtcagattaagtaattgattaacttagaacttgtgtgccggtttctgatcttactctagattgtttcaattttcttttctgttgtagctgttttaagcattcttggtttaataacataataataattgttgcaataaag

SEQ ID NO: 559 - DNA, 687 bp, Triticum aestivum
aggcgccgtctccgtcgccgtcgtctcgttcgtccccaaatcttcaccgagcttccgctccgctctcgccccgcgcagaacgcggaggaaggaatggacaagtatcacagcaacacccgctttgcaccccttagagacgctccatttgctctccgtggtgcctttggtacctccaactcatctttcaacaacatggatggccttagacactcctcaagcattgggcaagcaaagagctacacatcttctcccttaggagctctgcgacagaagatgcctccatctggaaaccgatccctacatacaagtcgtcccctgtctgctcctgttgcgaaccgcccactgtctccccatcttcctctgaagaaaccacagctgagcgccacgttctccatctcacaccgtatatttggcgttgcgctgggtgctgccatcatatccattcctcttgctaccaggtttggcgtcatgtttgaggtctgagtgaaatgcagcctgcgacgaggaggggtaacattgctgtgacggttccgttgttgcgcataatgcaactgtaggtgcagttgtaataactgtcttatcaatcctgcagattttatgaataatgtgggaaactatcctaaacatcagtgtaatgaaaacataattttgggtcttctttggtacgaggtctgcaaatccgaacca

SEQ ID NO: 560 - DNA, 686 bp, Triticum aestivum
  misc_feature (196)..(220): n = any nucleotide
aagaccctcctgcagaagcatctcacgcgcagtctctcctggctgagaccgcctctcctcctcaccgggacggctaccggacgagccggaggaaaccgcctgctggcccacgggagaagctccaggccagactcatcggagagcagggcaggatccccaccgtacacctcccctgagggccatcatacccgcgggnnnnnnnnnnnnnnnnnnnnnnnnngcggtggcggcagcagcgggctctgttggagatgatgcaaagcggaagagcgggaggcggagtcggatgatggacctggggaagaagatgggggacaagctggaggagaagcggcggcaggtggaggagaagggccggcacatcgttgagaagatgcgggagaacgcgaggaccaacagcatggagagaaccacctccgcgtagttaattagccaggagcagcaagttgggtcagtcgtgctctgtcgattctcttttcaatcgggaaatcggtgtatggtagctaagctgaatcattccagatgcatgtcacacatgtataaatgttgattgacaatgaacatctaggcagaaccagctaggacaatgtgtacctttgatggtgtttcagtattacctgagtggcaattaccatactgaatttttgtaatgtcaaattaatggcgtttcagtagtacatgagtga

SEQ ID NO: 561 - DNA, 1133 bp, Triticum aestivum
cattacagatgaaatgtccacgtttgggtactcgcatgaacctccttatgcacataccggtcatcaccaaggacggagtgatgcttgatcctgtgccaataacaataccagagtctgtaatgatgcacgactttgcaatcacagagaactattccatatttatggacctgcctttgttgtttcgaccaaaggaaatggttaagaatggtgaattcatctacaagtttgaccctaccaagaaagctcgtttcggcatactccagcgttatgaaaaggatgaaaaaaccatcagatggtttgaactccccaattgcttcatattccacaacgctaatgcctgggaagagggtcgacgaagttgttctgattacctgccgccttgagaacccagatctggacaaggtgaacggcacccataacgacaagctcgagaacttcgggaatgagctgtatgagatgagattcaacatgaaaacaggtgctgtcttcgcagaagcaactgtccgtctctgctgtagactttcctcgaatcaacgagagctatactggcagaaagcagcagtatgtgtactgcacgatactcgacagcatagcgaaggtgaccggcatcatcaaatttgacctgcacgccgagccagagagcggcaagaagcagcttgaagtcggtgggaatgtgatgggcatatacgacctgggacctggtaggttcggctcggaggcggtcttcgtgcccaaggagcccggtgtttctggtcaagaagatgacggctatctgatactctttgtgcatgatgagaacacagggaaatctgaggtgaatgtgattgatgccaagaccatgtcgcctgatccggtggcggtcgtcgagctgccgaaccgggttccctacgggttccacgccttctttgtcaacgaggaacaactggtacatcagcaagcagaggtgtgaggaacagtgataaaaaagactctgcatgttctacatgctgcagaaataaagaaaagaaagcagtacatagtacattgatacaattataggattatttgtacagtgaattcatcgacacgtggagcgagactgtaaatttcatatatatggcacttcataaattttattgcatactctcattcat

SEQ ID NO: 562 - DNA, 696 bp, Triticum aestivum
  misc_feature (422)..(422): n = any nucleotide
  misc_feature (426)..(426): n = any nucleotide
  misc_feature (437)..(437): n = any nucleotide
cacgcctgttcaagctccgttgaagacgatgatctacccggagcctgggttcgagcaccaccagcggcaggggacacgagctacgcgcagatgttcacggacgtgggggtgtactacacgccggcgtgcatcttcaggggggaggagttcgacggggcggagtcggtgaagcggctggagcagtggctgatcgagaaccacagctaccagccgcagtacgcggtgacggagctgaacgagaaggacttctggcgcatgttcgacgcgtcgcactacgagcactgccggcagaaatacggcgccgtgggcaccttcatgagcgtctactacaagtccaagaaggggcgcaagtcggagaaggaggtgcaggaggccgaggccgccatcctcgagcccgcctacgccgacgaggcctagggtcntcgntgttcatcgtnctcggccgtccgtgtctcgacggtttcggttccttcagtcgtcggaactctggattaattggttcccttttgcttggttgcttaattattaataagtagaacttgatcgatcgtgtagcgttgattggtagcagcctgcggcctgtagcagcatgagtcattgttgtcgcccgtgagtacttgattcaaccgcccctttatgttgatgggattaattgcttagaacttaaaatgaggcagatgcgtatgtgggaataat

SEQ ID NO: 563 - DNA, 657 bp, Triticum aestivum
tgccccggctcccaaggccagcactccgccggtcgaggctcccgtcgccggctcctcctgctcccgtcgccgaggcacccgccaccatccccaccaagcccgacgcccccgcgcccgccccggccaagaagaagaagaagtcgtcctccaagaagaagaagagcaaggccccggcccccgctcccgtcgccgccgaggcccccaccaagtccaagaaggccaaggcccccgcggcctccgacgactccgaagcccccggccccgcactcgatgccgccgccgacgacaccgcgggcgcgatccagagcatggcagggagcatcatgtcggcgtgcgcgatggcgctgggcctcctcgccctcctcgcctagacgagcaaagccggtgagcgcgggaggccagccggccccgtcgagacccggcacgagaacacgcaatcatgcggcggccgctgcgccgcgccttttgacgagctgtctgtgtccgtgtctgtgcatgccaccacattttgcgctgtatctcgtgtctattttttctaactggctggacgggccggcatctcctcctcctccttcctgtgtagtcccattactcacgcacgtccgcctcggattctttcttcctgtgtaccaaattgatgagatttgatttatattt

SEQ ID NO: 564 - DNA, 626 bp, Triticum aestivum
cacgatgctctggtggccagaggattgtgatgttctcttacggcagtggcatgacatcgacaatgttctccttcaaaatcaatgaaggccagcatccgttcagcctaacgaacattgcaagcatactggatatctccaacaaattggagtctaggcatgtggttccaccgaagaaatttgtcgaggcgctgaagctgatggagcaccgctacggcgccaaggacttcgtcaccagccaggacacgcgcttgctcgttccaggcacctactacctcacccatgttgactccatgtaccgccggttctatgccgtgaaaggcgacaccgcggccactccggtaaccaatggccattgattgattgactccacccagcctgaagctgcaataagcgccgcaagcgctcttagattatttatctggtagggaagggaaagggaagggtggagcttgcccagattaatctatctgtaaacttgttctaagtttgtaaagttagatagagctgtcattgtccgtattgccttgtcagtgagaattcttggctctgtagtggaacgttggtgctccgcttggttgtaaacttgtaagatctgaataatagaataatccaccgaattaccgtca

SEQ ID NO: 565 - DNA, 1077 bp, Triticum aestivum
attagttagagctttctctcttctcttctctgctctccactgtccaggaacagcaggagcaggaagaagaaaaagaggaggaagaagatgtcgatcaagcactgcgacaagcacgactgcgagcggcggcggctgtaccgccagttctgcgctgccctggtggccgtcatcctgctcatcctgctcatcgtcctcatcgtctggctggtgctccgccccaccaggccgcgcttctacctcaacggcctcaccgtggcgtgcctcaacgccacctcctccccggcgtcctacctcaccgtgacgctgcaggcgacgatcgccgcccgcaaccccaactcccgcgtcggcatctacttcgaccggacggacgcctacgccgagtacaaggggcagcaggtgaccgtccccaccgcgctccccgtggtgtaccagggccacctcgacgtctcggtgtggtcgccgttcctggtggggtcgaacgtgccgctggccccgtacctggcggtggcgctggcgcaggacgagacggccggctacgtgctgctcaccgtgcgggtggacggctggatcaggtggaaggccggggcgttcatcaccgggcactaccacctccgggtcaggtgccccgccctgctcaccgtcaacggaggccagggcagctacggctccatcgccggcggcggcgggaacggctacttcaacttccagcgcgccgcgccatgcgttgtcgacgtctgaacccaaccgttctctgaaatccagagcccttttggttctgctgggccgtccctgaaactaatttaagctctgctctgctctgttcggtaaatacgtatagtacaatggatttttgtgtcattttgaccgttcttgttttttggggtacttctttgatggaaataatccaataatatagtaggatggtatatttaagaagtatattcaggggaaaataagttgttgttagtgttgtatctataatacatgtacttgttattagagaagcagagtttaatcagggagtaggcgcatgtgcgttgttgcagtgctgctgtttttggtagagcaatggaaaga

SEQ ID NO: 566 - DNA, 1154 bp, Triticum aestivum
ggcttcctggagctaggcgaaggataccaaaggctattgaaggaaatcactagggcgaatgggagaaggaatggctaaatttatatgcacggaggttgaaaccattgatgactatgatgagtactgccactatgtagcagggctagtaggctatggactttctaggctctttcatgctactggcacagaagatctggctccggatcatctttcaaattcaatgggtttatttctacagaaaaccaatataataagggattatttggaggacataaatgagataccaaggtgccgtatgttctggcctcgggaaatatggagtaaatatgtcgataaacttgatttaaaatatgaggaaaattcagaaaaggccgtgcagtgcttgaatgatatggtgaccatgctttgatccatgcccaagattgccttcaatacatgtcagcattgaaggacaactccaattttcgattttgtgcaatacctcagataatggcaattgggacatgtgctatttgctacaataatgtgaaagtctttagaggagttgttaagatgaggcgtgggctcactgcacgggtaattgatgagaccaaatcgatatcagatgtctattctgctttctatgaattctcttcattgctagagtcgaagattgatgataacgacccatatgctgcgctgacacggaggcgtgtggatgcaataaagaaaacttgcaagtcatccggcctgctgaagagaaggggttatgatctggagaaatcaatgtacagaatgcctatgctggtcatgattgtgcttctcttggtggctattatcttgggtgtactgtatggcaagtgatccggtcaagatctccctcttatgttactataagtaggcaccgccttccctgtatggttttgcacgtgtacctcctgactgcagatggatatgtttggtttgcatgtagtattgtgctatgtaccctgctggtgccatgcatgctaattctttttgttctttgtttctgtcgtcccgtatgttgtttcagcttgtaatttgtttgaatctctaggagagacttacttagtgacatgtatcctatgaatttggcgtggcgccttggttgacagtgatgctgcattttgttgatttgtgactgatgtatgtga

SEQ ID NO: 567 - DNA, 607 bp, Triticum aestivum
cccttcgaggctcaacgacgtctcgccatcatcaacgccggccgccatcgccctcctcgcctacggcttcttccaccggcggcctcatccccggcctttgcttcggcgcgggcctcgggattacgcttttcgggatggcatacatgttcgtccacgacggcctggtccaccgccggttccccgtcggccccatcgcggacgtgccctacttccggcgagtggctgccgctcacaagatacaccacatggacaagttcgagggggtaccgtatgggcttttcctgggacccaaggagctggaggacgttggtggcctcgacgaactggagcaggagctcgccaggatcaaccggactcggagcatctgaaggactctggacatggtggcatacgcagctagaagagccttgtgatctcatctagcagatgaactacatttcaagattttttttaaactttttggtggttgctattgatttaattgatggtactggagatggggagtccagagccggaagcaagctaatgatcaggcagtggtggtggtgtactccccgttactcggctgcagggggtgtggatgtgtccaaacagttataggaagaag

SEQ ID NO: 568 - DNA, 681 bp, Triticum aestivum
gactgtcagatagtgcttcgctggagaggagaatgtctgcagacagtaatatgtcatactatctgaggagcatgactccaagtgcttttgaatcagcactccgtcaaaaggatggagaattggcttcttacatgtcacgcttggcctcactggaatctattcggaattccctggcagaggagttggtaaaactgacggaacaatgtgaaaagttgcggaatgaagctgctgctctgcctggcctaaaggctgaactggaagcactgaaacaaagacactttcacgctctagaacttatgggggaacgtgatgaagagttggaagagttacgaaatgatattgttgacctaaaggacatgtacagagaacaagtggatcttcttgttagccagctccagacattgggtgctcgtgtatagtggtgcaattgacccaacaagataacagttttgaaggccgaacatgttccgtcagagttgagaaaaccgcggcgagtgtgggaagttgatagtcatacgaggaagatatattttattgattttgagtacatcgtgaagagtggatctttgttgtaggatagtgtgttgtacactagactgaatagctccacagctctacattcattgatgattttcatgcaaagttttccttcacagaacacaagtgtattaccatatttgg

SEQ ID NO: 569 - DNA, 975 bp, Triticum aestivum
ggtgtcgcaggccaccaccatggaccgccacatcggcccctccttccagatcccggcggctccctcaccgtcttcttcgtcggctccatcctcctcaccgtccccatctacgaccgcatcgtcgtgcccgtatcccgccgcctcaacggcaacccgcacgggctcaccccgctccagcggatcggcatcggcctcgtgctctccatcctcgccatgacctccgccgctctcgtcgaggtcaagcgcctccgcgtggcgcgggactccgccgtcccagcgggcgccccccgttcccatgacggtcttctggctcatcccgcagttcttttttgtcggcgccggcgaggccttcacgctacatcggccagctcgacttcttcctccgcgagtgccccaagggaatgaagaccatgagcacggggctcttcctcagcacgctctcgctcggcttcttcgtcagctcggcgctcgtcaccgtcgtgcacaagatcaccggtgaccgccggccctggatcgccgacgacctcaacaagggcgagctctacaagttctactggctcctcgcgggggtttgcctcgccaacctcgtcgtgtacctcttcgccggcaggtggtacaagtacaaggccggaaggcccggcgccgacggcagcgtcaacggcgtcgagatggccgacgccgagccgtgcctccactgactgacctcgcgacgcgcctgttcgtccgtcgttcgtgtttctcaatcggacggccttgatttcttcgcgcatgtttgtacgatatacatactagtattggatggatcgtcgcgcggtcgtccacgtgtgcctacgtgtagtataatgggattaataacttcttagaggtgggcaatggaaaagccgggcggggaagggtgtcggtgactgaatgtcgctgcattttgtgaaaattcccgcccagatgtaaaatcacgcaaatgaatgaaaagaaaag

SEQ ID NO: 570 - DNA, 778 bp, Triticum aestivum
gccgaaccgccggcctcccgttcgcgtggccacggcttcgacctccaccgcctcgaccggcctcccgctcatcatcgcggcatcagcatcccccacgaccgcgctgcgacgcccactccgacggggacgtgcttctgcactgcgtggtgacgcgattctcggcgccctggggctgccggacatcgggcagatcttcccggacaccgacccccggtggaagggcgcggactcctgcgtgttcatgagggaggctgtaaagctaatgcatcaagcaggctatgagctggggaaccttgatgctacactgatcttgcaaaaaccaaaaattagcccgttcaaggagactatccgatctaacttgtgtgaactacttggggcggatccatctgttgtcaatatcaaggccaagacgcatgagaaagtcgacagtctaggagaaaacaggagtatagctgctcataccgtagttctcctgatgcggaagtagagtattagaggtatactacataatacaggaattgtattgtattgtagtgttgctgtacaagaggtgttactacactatccctgtggtctagtcaatatggaagcttcagggaaagtagtaaagctgagtacaatgaagagaaatgtgtatccagcttgtgtctcattttattgctccaaaattgtattcttgtcttgcatgggtgctagatagcaatcattttggaagttcttgttattttcttccggaccttaagaaccattcacaaattatatctgcagtatactggta

SEQ ID NO: 571 - DNA, 665 bp, Triticum aestivum
attttaagagtatcgagggggatagaactctgggacttcagtcactccctgttgcctttggtatggaaactgcaaaatggatatgtgttggagcaatcgacatcactcaattatctgttgcagcctacctcctgagcaccggtaagctgtattatgccctggcactagttggactgacaattccccaggtgatcttgcagttccagtacttcctgaaggaccccgtgaagtacgacgtcaaataccaggcgagcgcgcaaccgttcttcgtcttcggcctgctggttactgccctggcgaccagccactgacggacggacctctgctttggatgagggggcattttgtacaacacagatagtggaataaatctgcagcaacaacatcaagaacgcccccctgaatgctgaagatggaaacattaggcggtggctctttccttctgctgccttgcctctagtgcgcgtagaccgtaggtgcacagtgccaggttgtttgtttgtgatgttatcagttggctgtacaacgtaattttggatgatacggtacggtacgttactgtttatgatcagattgtttctccttttttttaacacatcagattgtttctcctgtaaagtgcatttcgataaagcctttccttccgttccagaggagcatcattc

SEQ ID NO: 572 - DNA, 626 bp, Triticum aestivum
atcaggaaaggaaaattgccggacgaagccatcagctacgatgattttcaaagtccatggccttcactcgagctgtcatttttgagacgctaagattagccacagcttgtgaatggactgctgaggaaaactaccaaggatgtagaaatgaatgggtatgtcattccaaaaggctggagaatctatgtttacacaagggaggtaaactatgatccgttcatgtatcctgacccgatgaccttcaatccgtggagatggctggagaagaacatggaatcgcacccgcacttcatgttgttcggagggggcggccggatgtgccccgggaaggaggtgggaactgtcgagatcacgaccttcctccactatttcgtgacccgatatagatgggaggaagaaggcaagaacacaatcttgaaatttccccgggtcgaagcgcccaacgggctgcatatccgagttcaagattactgaaatcttccaacaaacattttgcagagtttagatagatatatgacaaagacaaagacgatgagagcgcgacggatgattagatgagatctttgatgcctgtaaaaacataggaacatagcgatagtatagatgttataggttaactaggtagc

SEQ ID NO: 573 - DNA, 910 bp, Triticum aestivum
tctccattgcatacggaaaaacagctgctgggcttgctcgggattggaaggtatcaaaaagggaagcagaggatacactggatctctggtacagcgacagaaaagaagttaagtcatggcaaagggaacagaaagatttagcatatgagaagtctgaagtttatactttgcttgggcgatcgcgccgtttccccaacattgcttctgtatcctctaaacaatggaagcacattgagcgtgctgccatcaatgctcctgtacagggcagtgcagcagatgttgcgatgtgtgcaatgattgagatagaaaggaatacccgtcttaaggagctcggttggaccctcctgttgcaggtgcacgatgaggtgatactggaaggaccttcggagtcggccgacgtggccaaggcaatagtggttgagtgcatgtctaagcccttctacggcaccaacatcctgtcggttgacctcgctgttgatgcaaaatgcgcacagaactggtatgcggccaagtagactcccagcgtcgttaccccctccgtcgactccccaacatggtgtagttgcgccccagatgcgcacatactccagccaattttggtccttcttgaactggtgtcaactgctgcatacgagcagggcatgcataaggctcatcctgccatggcagcagaaaagtgagattagcagcgaaggcattgtaactaccacttaggctggatagctggattcccacaccctttctagtaggaactctgaatcgagctagagggattgtagttaagattggcatgcattttgtgtataagtttccttcagtgtgctaatgtattaggttagatgacatattctggtgatgtggacacgatcatggcgatatgactttgttctgatcaatcgagaaacgctgt

SEQ ID NO: 574 - DNA, 887 bp, Triticum aestivum
  misc_feature (662)..(682): n = any nucleotide
gcggttgctgcgccggagaaagtggaggaggtgaaggaggcggttgctgcgccggagaaagtggaggaggtgaaggaggccggtgcgggcgaggaggtgatggaggtcgccgcaggtgaggcaaaggaggcgggtgcgggcgaggaggcgatggaggtcgccggcggtgaggcgaagaaggcggaggaagggggtgaggtgaagaagacggagggggggcaggggaagggggagaagaagaagccgaggagcaggaagccccggtcggcggggccgcaccacccgccctacttcgagatgatcaaggaggcgatcatggcggcgggcgacggcaaggcgggggcgagcgcgtacgcgatcgcgaagcgcgtgggggagcggcacggggaggcgctgccgggcaactaccgcaaggtgctggccgcgcagctccggagcttcgccgccaagggccggctcgtccgcgtcaaggcctccttccgcctcgcccccgccgaggagaagaaggccctgccggccaagaagacgaccaccaacaaggccgcgtcgaagaaggcgcggccgaagagggcgaagagggcggggccgccgccggcgaagccgaagccgaagcagcccaagtcgatccgcgccaggaaggccaacaaggccagcgcctgatnnnnnnnnnnnnnnnnnnnnnctgtcccctgtacatatctgctccgtagcagtactagtcgtactggcacgttcgatcgagcgccgtgttctgtaaatatccacccgtgtgtgtgtgttccggcaataatggcgctctcgtgccggtgtcgatggatgtgaggaaggagaagatggtgcatgtgcctgtgaccgcaaatctcaagactgatgcttgtaacactcgg

SEQ ID NO: 575 - DNA, 752 bp, Triticum aestivum
ctgttgcactggacctgtgagcattcattctcggacataattttggaggctcaatcaaatgaggaaatgaagtgtgaccacgggtcgtgccaattgccaactccgcacgttcatagccataaaatcgtgctgaccatgagctgcgattacctccgggcattatttcgatccgggatgcatgagagcttctcggacgtcatcagtggttccgctcgggtggcaagcgctggacaagctagtctactggttctactcaggcgagctgcccaaagccgccctcgactgccggtggaacaacctgagcagcgacgagcagcgctcccacctgaacgcctacgcggagctgtcgtcgctggccgagttctggttcctggagggggtgaaggaggagagccttgcggcggtctcgtccctcctggaatcgagcaggagcgccgccgcggtcgagttcgtcgccttcgcggccaacctgggccagtgggagatggtcgaggccggcgtccgcagcgtggcgcacctgtacccccggctgcgggactcgggccggctggagcagctcgacgacgagctgctcaacatgctgcggaccgagtacgtccggtactcgcagcacggaggcgggcagaggtgacttgagtacgtgaatctggacgcacgtcgccgtgcgctttgtagatagatacagggacggacgctgtctgccatgctttcttcacagagaatatgcagtgtagtctgggttagcagagctg

SEQ ID NO: 576 - DNA, 591 bp, Triticum aestivum
acaagcttgttgtcagaatattgccttcttggctctggtttattgttggcaatttatgttgctgctattgtagtaccttttcttattcctcaggctttcaggagctttgtaatggtgccttttcatgctgctcttgcggttgctttaatttttcagacatgggttctggagcaagcaaagtatagtaaggatgctatttcacagtactaccggttcatctggaacctcttctacgccgaatacatcttcttcccgttgttatagagatatggcgtctgacatgggctacactatcggagcacgcaccgaagcagggacttgttgggggcagcagaagagaaaccctttgtggcccataaagcgtgagcaatttttgtatgtacatactgtttgactggtaggggaatagagcagcaatgcgacgaggatcttgacgatgctgtgggagttcccattgggtcctagcgttgagcagataatgtatttacccagtagaaaatgacctggttgtttctgccaaacaaagaggaaaatatgtgaaagggaaaagtatcgggccttgttttggagggtttgggcactatttcttcg

SEQ ID NO: 577 - DNA, 582 bp, Triticum aestivum
atcacgcaggatatccaagatttctcgtctgatctgcaactaaaggaagtcaacgttgataactcaatccctggagaaaaaccctctgtccagatcaagacaggatggcggcaaggatgtccccaagaaatatgatgatcagctatcagattcatcagaagatgcgcttgatggtagaagaatgagacgccagggtgattcccctgacgattctcgtgtgaaacggcagtcccctagtagagctggtgactcttatccaaaggatgggattaacattgatcgtgccaaaacggattcacttggtgcttcttatgatgctattgcagcgaagaaatactctggtaaagttgatgaagcttcccaatcagatggtggaagtcctcttcaaaaagctaagaaaaggacacatgatagtaaacacattgatcgtcgcagttcgggctcagaagaatctgagaaacacagatcccagtccgagaagcgaagacataaaaagggtcacaagcacaagaagcattatgatgatagttctgattctgattctgactcagatgacaaggagtccaagaggaggaggcgaga

SEQ ID NO: 578 - DNA, 828 bp, Triticum aestivum
  misc_feature (516)..(535): n = any nucleotide
aatggcacccgcagtcaaactcgacatggcagtgccggtggctccagtggaaggatggtcaagggtgggcgtgttgccaagttggtggatcatctccgtaatgctgatgaatttgatactaagttcaacctgtacctcgctctaactccgcttgatggacaaagcatgcctaaactggaaaagtcctatctcagctgccagccaacattctctgttagccacctatgccagtttgttgctcttcagctgtcacggcaagccgcagaggtggagatatacttcaggaagaactccatgaacgggtcgcttaaaaccgaagacaccagcgcagacgacgagccaaaaccggagcggctcgacggcctggaaaggctcaaggaggataattcgctttcagagctttaccctaagcttgcctctggtgttggggacctggagctgctgtactctgtgaaagcacaagcctagctacgcacagttcctggcaccagccagctacatatcttggccgtcaannnnnnnnnnnnnnnnnnnnccgctaatcccatgacctgcaggaaggatctactcgccgtgaaaacctgtacatatatcatcattcgatatagaaaaaaagggggcgacaaagtagtagatttatcatctgtgtcttaatgtttgtttaaatttatgtgtgtgttatcttgtggagtggttcattggtgggttaaacgtaaaattgaccagtagtcgaattgagtagcagtgtgtaaaacaggtcagacaaaattacctggctcattccttattctatactgtataattataatgtactgtatttggtggcgc

SEQ ID NO: 579 - DNA, 760 bp, Triticum aestivum
cggaagccagcgttcgagcgtgtgctccagcgcaggaagaacagcgccgaaggcagggaaatcttttcgagcgtcctcgggttaatccactcgggttttcacgcctgggcatgcctgagaacacgttcggtgctgcctatgctcagttcatgggatcaaggaacttctcgccagacgaccgtccaccagttcgcttcatggaaaccgacgaccttgcctttgtcgcgacccgtgcccgtgaggtgcatgacttctggcacgtgctgttcggcctcccgaccaacctgatcggtgagactgctctcaaggtgatcgagttcgagcagatgttcctcccgatgtgcatgctctctgtcgtcgggggctccgcgaggttcagcgagaagcagaggaggctgttcttccagcactatctcccatgggcgaccaaggcaggtgtcaaggctactgatctgatgtccgtgtactatgagaagcacttccatgaagatctggaggaggtgaggaggaactgggggatcgtgccatgcccggatcccaggcgacgagcagtgcttagactttaggccagtgcatttttgcataaaaacgtctgtatctttggtttctcagccttgcttgttgtcagtttctctttgttaacaagtaaatagggtatggtagctgttggatgttgcttcgtaaggtaatatgcaatgttgaccacaaactacttgtatggtatatcttctcggtttgctcgaacgacttataatattct

SEQ ID NO: 580 - DNA, 613 bp, Triticum aestivum
gttcttttaaacacgcattggatttactgaacgcatgttgtgggttcaaatgctggacctaagccataataagctcagatccattgaaggtttggaggccttgcagcagcttgtgtgcctgaacatcagcaacaaccagatcagcagtttcacgtcactcgaacccctgaccaagatagtttccttgaaagcgttggatttgtctttcaatgagatcaaagctcacccgatcgacacaacacggtatatgtgctcatctccgttttcacacaaagtcgaacggtgcgaagccttcgaggagtgccgaaagaaaagcgtcaacgtggaggagttctgggacgccatactcttcttcaaatccgtgaacctggtgcagcttgacatcaagggaaatgcggtcgcggacaaggatagcttcaccactgttgtgatgaccctcagcccttctctcaagtggctcgacggcacatgtatccattagccgttcatcggagagtggaacttgtgatagaatggggaaagtaaacgctgtatactgctattttccctagctgccattgtctgattcatgtattattacagttaagcagctcttgagagactaatacaatca

SEQ ID NO: 581 - DNA, 547 bp, Triticum aestivum
cttcatcgagcggcaatggcctccgaccgcctcagcgcgctccgggccttcgacgacaccaaggccggcgtcaagggcctcgtcgacgccggcgccaccgccatcccggccatcttccaccacccacccgacgccttcgccccgtccactctcgccaccgacgtcgccgtcccggtcgtcgacctctcctgccagcgctcggacgtggtcggcgcggtgagggccgcggcggagacggtgggcttcttcctgctgacgaaccacggcgtgccggaggcggccatgttggggatgctggcggcggtgcggcgcttcaacgaggagccggcggaggccaaggcgccgtactacacgcgggaggcggcgaggcgcgtgcgctacagctgcaacgcggacctgttccagacgctggtgggcaagtggcgcgacaccgtgtacatggacgacgcggaccggtcggcggcgggcgaggagacggaggaggagctcctcctcccgccggcgcttgaggggcgtcgcgccggagttcacggggcacatgcggggg

SEQ ID NO: 582 - DNA, 771 bp, Triticum aestivum
  misc_feature (570)..(570): n = any nucleotide
  misc_feature (573)..(574): n = any nucleotide
atcgaggtatatgacctttgacgagctttacctctactgctactacgtcgctggcactgtcggtctcatgacggtaccggtgatggggattgctccggactcaaaggcctcagcagagagcgtgtacaatgccgcactggcccttggcattgccaaccagctcacaaacatcctccgagatgtaggagaagactcaaggagggggagaatataccttccactggacgaactggcacaggcgggtctgacagaagaggacatattcagagggaaagtgacggataaatggaggaggttcatgaagggccaaatccagcgcgccaggctcttctttgatgaggccgagaagggtgtcatgcatctagactctgcgagcagatggccggtcctggcatcgctgtggctgtacaggcagatcctggacgccatcgaggcgaacgactacaacaacttcaccaagcgggcttacgtgggcaaggcgaagaagtttctgtctctaccggcggcgtacgcgagggcggctctttcgccatgagcaaagcaatcctgtagatcagatgtttttttatnctnntttttctttcttattttgtcctgtcaccctacaatgattttttttggctgttgtatatattcagctgtatgtttgccatacgccctcgtcggtatttaggtcaagggaccgatgtcgggtcctgctgtactgaaagtctgaaacacttgttactaccacagtggagaatcaaaattgctccagttgaatgaagaaga

SEQ ID NO: 583 - DNA, 709 bp, Triticum aestivum
gctggtgattccgaagcaagcacgcctgagaagcacttcccgctgcagctcccggccgcgggcggcgagaagcaaggggcctgctcctgaacttcgaggacgccgccggcaaggtgtggcggttccgctactcgtactggaacagcagccagagctacgtgctcaccaagggctggagccgcttcgtgaaggagaagggcctcggcgccggagacgtcgtcgggttctaccgcgcagccgccggcgaggacagcaagctcttcatagactgcaagcagcggccgagcaccaacagccctgcccccgcagaccccgtggaccagccggcggtgcccgtgaagaaggccgtgagactcttcggcgtcgaccttctcacggcgccggcgtcgccggagcaggggatgccggggtgcaagagggccagagacttggtgaagtcgccgcctccgacagcggcgttcaagaagcaatgcatagagctggcgctagcgtagagttggaactattagctcgatcgatctcttctctccagctaggcggcggtttttgctcgcgtaattcaggtggtagagcttagcttaattagtcccttgttggtactatcatcaactttgtttgtttatttgtcatgttgttgcatgccctgatgtaaatcttatcctcccaaaaatgtatactaattgaggaagccctagaaggctagcctaga

SEQ ID NO: 584 - DNA, 864 bp, Triticum aestivum
cagaccttatatatgaagttgaactcattggtttgatgatgctaaagagggaaaagctcgtagtgacatgacggtagaagagaggattgaagcagcggataggaggaagcttgagggcaacgattactttaaagagaagaaatttgaggaggctatgcagcaatatgagatggctgttgcgtatatgggagatgatttcatgtttcagttgtttgggaagtacagagatatggctttggctgtgaaaaacccgtgccatctcaacatggctgcttgcctgatcaaacaaaagagatttgacgaagctatcgcacagtgtagcattgtgctgtcagaggacgaaaccaacgtgaaagcgctgttcagacgtggaaaagctagagccgagctcggccagacagaatcagcgagggaggacttcctgaaagccaagaaacactccccggaagacaaggagatcatgcgggagcttcggtcgctggcggaacaagataaagcgatgtaccagaagcagagggagctatacaaaggtctgtttgggccgaggcctcagcccaaacccaaggccaaaaatttcgccgtcctcttctggcagtggctggtgtcactggtccgttatcttgccacgatgttcacgggcaagaatgactaggatggtcgttgtgagtctaggtgactctgatgcaagtgctactggcgacataccgacacgacaagggaaaacctgatgatatatctatagcttgtggttaagagacaccttcctctatatatacttgagtataattgttttggtatggagttttgcctggcactttggactggaggagatggtctctttgtgttatatgaagattggaactg

SEQ ID NO: 585 - DNA, 174 bp, Zea mays
atggtgagcatgcggttgccgaggccgttgcaggggaaccacaccacgtacttgcactccgagtcgtccgtgttgcgcccggccttgagaagcttgacggcccgccggtaccgcttcgccctcgggccgcacttcttgtgcctcgcctcgtacttcctcagcttctgcaccagg

SEQ ID NO: 586 - DNA, 516 bp, Zea mays
atgcccgctcgcctgatgcccgtcaccgtcaccttccctgtcccgtccgatggccgccgccgcaacgctgccgggaagcggtttttcgcgttcctgggtattactagtagtgtagtgctagcatataccaccatccatggccgtgcagtggctcctcgatcagtccttgcgagcgaaggtcatgggcaggccgttgagcggcagcgcgaaggggccgaactgcacgccgctctcggacttggaggtggaccacctgtatttggtgacgaggtggtggaagagcacgagcatctccagcttggcgagctcgttccccgggcacgagtgggtcccgttgccgaacggcatgaacgtgttgggcttgggagcaacctcgaatcgggaggggtcgaacttgtccgggcaggggaagtggtcggggctgtggtggatgttccggaacaggggcaacaccttccagcccttggggatcaggtacccttggtactccacgtcctccaccggcctcccggaagg

SEQ ID NO: 587 - DNA, 810 bp, Zea mays
atgtcggccggcgcgggcggcggcgggtgccgccaccgcgggagcgggccggcgaggaggagcgtctggaggagcggcccggccgacaccacggcctccaccagccggcccttctccggcagccgccgcgcgagcgccatttccagctccgcgtcgtcggcgtccggcgcgttctcgttcgtgacgaccgcagccgcagtagcagaggcagaggcagagcatcctccccctcctgccgacaggacgcttgctgcagcgtggaggctcggagcaggcgccaccgccgccgccgccgccgccgcctgggcctggtggtggcggaggagcacgagcgagtggcactggggccgggggtcgtcccgctcggcgggcgtggtccacaccagcggcgccagccgctgccgcctcggttgtcgacgtcgggcgcggcgcgcgcctggcgaccccccagccgcgtccgttggtgggcggtcccgtcgtgctcgccgggcggcgggggccggcgtgccaggcacgcggcccgcccaggctgggtgtcgtctgtgggtgtccgccgccccccgctgtttcgccctgtctctaacgctcgagggggtgtgggtggcgggtgggtcgggtggttgtgaactcctttgcagtcctggcccccgccttctgttctccctcgtcgccctggcccccggtgggcgtggaggtgtgctgcgcggcccgcctgcggcgcgcccccactcgtcctgcccctgtctgactccgctatttgcgcgtatgatgatcccgcaggcggtgtggccttgtgcggggcgcggttcc

SEQ ID NO: 588 - DNA, 648 bp, Zea mays
atgcttaaagaggcattgacaaagcgaaacagtgagctgcaatcttcaagaagcatgtatgctaagacagcaggaaagctccgaagctttgaagttcatatgttgactggaaaccaacataagagtccagctatgaacatggatattcattctgatggtgcactgagccaaaatggaagcaacccacctagcatgacttccatgtctgaagatggggttgatgatgaaggaagttgtacagaatcttgggccaacactctggtgtctgagctctctcagttcaaaaaagagaaggctgccaagagcagtgcgacagaaagctccaataggttggaactcatggatgacttcttagagatggagagattagcatgtctgtcttctgatgttaatggcaatggcagcactattgacaaaatgaagatagatgaagttggggctactttggctgactttactgaaagagatggtgttaaagatttgcagtcagcttcaccaatgacagaaagtccatctaataaacagcgtttgtctgagaaatcttcgctttcgaaattccagtcaagaatatctttattactggattctgaatcagcagagaataatgctgaggtacttgatagtatcagaaacattctaaaggatatt

SEQ ID NO: 589 - DNA, 348 bp, Zea mays
  misc_feature (246)..(246): n = any nucleotide
  misc_feature (286)..(286): n = any nucleotide
  misc_feature (316)..(316): n = any nucleotide
atggaaacgggggcgatgccaccagcctcggccccgccgcgcgccgcgccagtgatgaaggggggacggaagcagcgcagcacattaggagccgtcacgctcgagaaggccaagctcgatctctcccagcgtcgcaagaagatcatgcccgagctagcaaccggtggtggcggtggagatgttggaaaaaggatcggtcatggtgggggtgatggtggtgatgatgatggtgatgatgatgattantttgatgattttgatgatggagaggaagaagaaggtgggntttttaggaggtatattgttgtaaaagagntatttaatagaagagtttgtaaaaaatggtgg

SEQ ID NO: 590 - DNA, 633 bp, Zea mays
atgacgaaggcgtggaggccgatgctggcgtcggccaccaagtgctgtgcggcggaggacgcggcggtggcccccgacggcctggcgcggtgccggccgcagcagtcggagctctcgcggcggctggcgtccttcaggcgcctgtcgtcgctggccaacagcccggcgtcggcggcgggcacggacaaggacggcggcagcgtcaagcaggccggggagatggcgggcccgctgcagctgcactccttcggcctaggcgagctccgcggcgtcacgcacgacttcgccagcagcttcctgctcggagagggcggcttcggcgccgtgtacaagggcttcgtggacgccggcatgcgcccgggcctcgccgcccagcccgtcgccgtaaagcagctcaacgccgcgggcttccagggccaccgggagtggctcgccgaggtcatcttcctgggccagttccgccactcgcacctcgtccgcctgctggggtactgctgcgaggacgaggagcgcctgctcgtctacgagttcatgccgcgcgggagcctcgagaaccacctcttcaggaggatctcggcgacgctaccgtggggcaccccggctcaaggtgggccatcggcgccgccaagggtc

SEQ ID NO: 591 - DNA, 576 bp, Zea mays
  misc_feature (31)..(31): n = any nucleotide
  misc_feature (51)..(51): n = any nucleotide
  misc_feature (59)..(60): n = any nucleotide
  misc_feature (93)..(93): n = any nucleotide
  misc_feature (143)..(143): n = any nucleotide
atggataaattaacatgtgacatggagactntcatgaagcactgttcagtncagttcannccaaattcagctcccctgaatcatgtgcagctntgcagattatctctaacatgcattggatttgctgaacgcctgttgtggtntcaaatgctggacctaagccataatagtctgagatcagtcgaaggattggaggctttgcagcaccttgtgttcttgaacatcagcaacaaccagatcagtggtttcacagcacttgaatcccttacgaagataatctcattgaaagttctggatttatctttcaacaagattggagctcactcaattgacacaacacggtatatctgctcgtctccattctcacacaaaatggaagcaagtgaagcttttgaagcgtaccagaaggtaaatatcaacgtggaggaatactgggatgccatactgtttttcagatctctgaagttggcacagcttgatataaaaggaaatgcagttgcaagcaaggagaacttcagaactattgtcatgatgctcattccttgtctaaaatggtttgatggtgaagatgtcaat

SEQ ID NO: 592 - DNA, 225 bp, Zea mays
atgggggcgagtactgttcctacatcaacagcagcggcagcggcggtggtgggaagaagggccgtggcggtggagggagctcgagcgtgtcagactaccgtaaggatcgggaggagtggacggacggcgcgatcagcagcctcctcgacgcctacacggaccgatttgagcagctcaaccggggaaacctgcggggtcgggactgggaggacgtggccggcgccg

SEQ ID NO: 593 - DNA, 498 bp, Zea mays
atgtcgcccaaggccatccagcgcgtggccgccgccgccgcggcctgctgcgctcctcagagtaacggcattggcagtgcctgctgcgccgcgccctgcgctcctccgagtaatggcattggcagcgcctgcggccacgccgagaccgccccggcgttgagcggcagcccgccctccagcgacagcgacgtctcctccccggaggcggggtccaccgccagcagcgacggcgagctggcccgctacggcgacggcgacggcgacggcggcgtcagcgtggactacggctcgctcgccgacatcgacgccttcttccagtcgcccaagtgcatggacgacgaccactactactacgcagcgctcatggacccctgcggcgccttcttcgcgccggcgccatcggttgcggcggacgacgacgcagcagccgccgccggatgctgggaggacggcgacggcattgcgctctggagcttcagcttccccgctctggactgc

SEQ ID NO: 594 - DNA, 681 bp, Zea mays
atgctgggcgcgcgtgtgcagctgaaggggtggcaacaggcagctgttgcatttggttctgcgtttggggccttgcttgaccctaggagggctgatcttatagctgctcttggagagactactgggaaaccagcgtttgagcgtgtgctgcaacgaatgaagaacagtgcagaaggcagggaagttctctcggagcgtccccgcgtggtatcctcgcaggtttcccatgcctgggacctgcctcagaacacatttggcgcggcgtatgctcagttcatgggatcaaggaacttctcaccagacgatcgcccacctgtccgtttcatggacaccgatgagctcgcctacgtcgcgacacgtgctcgcgaggtgcacgacttttggcacgtgctgtttggtcttccgacgaacctgattggggagaccgccctcaaggtgatagagtttgaacagatgttcctcccaatgtgcatgctgtcagtcgtcgggggctctgcgaggttcagcgacaaacaaagggcgctgtttttccagcactacttcccatgggcaacaaaagctggtctcaagtgtactgatctgatgtctgtatattacgagaagcactttcacgaagacctggaggtagtgagaaggaactggggaatccttccttgccccagtcccaaaaagagcagtgta

SEQ ID NO: 595 - DNA, 720 bp, Zea mays
atggcgagctctcagtgctgcgataacccgccggccctgaacccggcctgcggggagggcaaggtcgtcgacagcttcggcgggctcaaggcctacgtcgccggccccgaggactccaaggccgccgtcgtcctcgtcgccgacgtcttcggattcgaagcgccgattatgaggaagatagccgacaaggttgcttcgtcagggtactttgttgtggtaccagatttgtttcatggggatccttatgcacctgagaatgttgagaagccctttcctgtgtggataaagtcacatactccggaaaaagggtttgaagagacaaaacaagttattggggctctaaaggagaagggagtgtctgctgttggagctgcagggtattgctggggtgcaaaggttgttgtggagttggcaaaagctcatgagatccaggctgctgtgctgttgcacccttcttttgttaccgttgacgatatcaaagaggtcaagtgcgcaatttctatcctcggagctgagattgacaaaatgtccccaccggagctaatcaagcagttcgagcaggtcctttctttgaactcaggggttggccacttcgtcaagatcttccctggtgtggcgcatggatggagcgtgagatacaaccacgacgacgcagctgccgtgaagagtgctgaggaagcctttgcggacatgctcgactggttcaacaagaatctgaaa

SEQ ID NO: 596 - DNA, 147 bp, Zea mays
atgccaagagccccgagagcagcagctccggctccgcctccgcctccgcctccgacgacgccagcgccgcctcgccggcggcgccgcaggacgccgagcccaacccggacgacgcgctgttcgacctcccggacctgcttctggacc

SEQ ID NO: 597 - DNA, 1143 bp, Zea mays
atggacggccgcatcgacggcgtgcggctggtgcacagcacggcgacgcgcagcacgcggactgcctcctccctggcccacccttccacgatgcccgggtccaccagggacatcaccttctcccggctctccagccgccgcgacacccagtccaccaggtcccggctctccaccaccgccggccgccccgtcaccagctccagcagcaccacgccgaagctgtacacgtcgctcttctccgtcaccttgcacgtgtacgcgtactccggcgccatgtaccccagcgtgccggccacgacgccggcggacgagtggccgccgccgccgcctgccgagctgaggatcttggcgagcccgaagtcggcgagccggggcttgaacgactcgtccaggaggatgttgctggacttgacgtcgcggtggaggatggggcggtcgcagccgtggtggaggtactcgaggcccctcgccgcgcccaccgccacgtcgtgccgctccacccacccgagcgcgcccatcttccgccccgccgccccgtgcagccgctcgtacaggctgccgttggggaggtgctcgtacaccagcaggctcgccgcgccgtccgcgctggtgatgctgcacagcagcttcaccacgttcacgtgccggatggcgctcagcgtccccacctccgagtcgaactcgcggcaccgcaccgacgccgccggccgcagcatggcggcggacggcgccgtgctcgtcgccaccccccgcgtgacgtgcttcacggccaccaccgcgccgttgccgagcttcacgcggtacacgttcccagacccgccgctgccgaccaggttctcgtcgcggacgccctcgatgatctcccgctcgtcgaacgccaggatccggaacgacttgaggtcccacgagcccttcttggcgaacagcttccccgcggaggcctccgcgcgccgccgccgccgcttctgcaggcacatggccacgcccgcccccgccagcagcaccgccgtgacggcgaggatgcacgtcacggccaggcgctccgcgttcgccgaccggctcccggagctccgaccgcagcggcggaggaagacagcgccgttggtggcacacagcccggggttcccgtcgaagctctcgccg

SEQ ID NO: 598 - DNA, 504 bp, Zea mays
atgggggacgctggcgctgacgcctcctcctcggcgccgccgccgtccgggtccttctcctacttcgccgtcttccagaactaccccctcgtcgccgccctgctcggcttcgccgtcgccccgtccatcaagttcttcgtcacacggtacaaggagaacagatgggatcccaagcggcttatcggctcgggtggcatgccgtcatcacattccgccacggttacagcactagcagtagcaattggattccaggatggctttagctgctccctctttgcaacagcaactatatttgcaagcgtggtaatgtatgatgcttctggtatcagactgcatgctggaaagcaagcagaggtattgaatcaaatagtttgtgaacttccttctgaacaccccttgtctgagacaagaccactgcgagaacttttaggccatacaccaactcaggtggttgctggtgcattgcttgggtgtacaatagccacagcaggacaattattcctt

SEQ ID NO: 599 - DNA, 255 bp, Zea mays
  misc_feature (184)..(184): n = any nucleotide
atggagcacactaagtcaggccccagcagttggccagaactggccgacgtggtgccggtgccgcaggacgatgggcctagccctgtggtgtccatcgcctatcgagatgactttcgtgaggtcatggattacttccgcgccctctacctcaccggtgagcgaagccctcgcgctctccgcctcnacgccgaggccatcgagctcaccccggcaactacactgtctggcatttccggcgccttattctggagtcac

SEQ ID NO: 600 - DNA, 354 bp, Zea mays
atgattccgcctgccacggtccttccagcgcccgcggtgtcggcggccacaccatcgccgaccgggccgggtgcgtcggcttcgctggccgaaggtgccttagccttggagcgcttggtgctggtgggtgcctcggcgacgggggctggagccggggacttggacttcttcttcttgttcttggacgacgaagagggcttcttcttcttcttggccggcgcgggcgcggagacctcggtggtcttgatgggcggggagacgaggatcaaggcggataggcgatgccgcgggcttcacctcggtcaccattggcgtgagcttggtcctgcgatatccctgctaattccccacccg

SEQ ID NO: 601 - DNA, 276 bp, Zea mays
  misc_feature (140)..(140): n = any nucleotide
  misc_feature (175)..(175): n = any nucleotide
atgcatgacccccatggagtggcagctgtggacgacggagacgatctccctgcagagggcggcggcggcacgctcggagtagtgccccctcgcgatgatgcggtcgaagagctccccaccctcgcacagctccatgacgnagttgacggagtggcggtcctcgtaagcgccccgnagctcgacgatgctgcggtggcccgtgaagtggtgcatgatctgcacctcccggcggacgtcgtcgacgtcgtcgctgtgcgcgagcttccgcgtcgcgaa

SEQ ID NO: 602 - DNA, 210 bp, Zea mays
atggggacgttcagcgcccactccggcgccatgtaccccgccgtccctctcatgcgcgacagccgcatgctgtcgccgtcgccggcgccggcgtccctcttgcacagcttggccagcccgaagtcggcgaccttggggtcgaactcccgcgtcagcaggatgttctccggcttcacgtcgcagtggatgacccactcgaggcactcgtgg

SEQ ID NO: 603 - DNA, 276 bp, Zea mays
atgtctgacatccaatcaccactgctgaacaaaggcagttggccacctttaggttcaagtggcaatacagtaggatccacattagcatcaacagtacttgatgatccagctgttcgattcaggccgagttttcgattagaatttaacgaattgcctttccaacttaagatatctgctggaataagagcaccaggagcagccatcagatcaaccaaaaactccctttcattgtccatcttaattatgtttatagcatcgtcgtcatcaccaccagta

SEQ ID NO: 604 - DNA, 789 bp, Zea mays
  misc_feature (480)..(721): n = any nucleotide
atggcaaccgtaactgaggaagttgctccggtcgtcaccgtctccgaggagccggcgccggaagcggcgaaggaggtggtggagaagccggaggaggggaagaagcccgacgaggagggtgacgagaggaagaaggccgaccccgccgccgagaaggagaagaaggccgaccccgccgccgagaaggagaagaaggcgaggaagccgcggagcaggaagcccaagtccgccgggctgcaccacccgccctatttcgagatgatcaaggaggcgatccctgtcgcaggacggcgggaaggtcggggcgagcccgtacgcgatcgccaagcacatgggggagaagcaccgggacgtgctcccgcccaattaccgcaaggtgctggccgtgcagctgcgcggcttcgccgccaagggccgcctccgtcagggcaaaggcctccttcaagctcgccgccgccgaggagaaggaagccctccggnnnnnnnnnnnnnnnnnnnnnnnnnnnnnnnnnnnnnnnnnnnnnnnnnnnnnnnnnnnnnnnnnnnnnnnnnnnnnnnnnnnnnnnnnnnnnnnnnnnnnnnnnnnnnnnnnnnnnnnnnnnnnnnnnnnnnnnnnnnnnnnnnnnnnnnnnnnnnnnnnnnnnnnnnnnnnnnnnnnnnnnnnnnnnnnnnnnnnnnnnnnnnnnnnnnnnnnnnnnnnnnnnnnnnnnnnnnnnnnnnngggtaaaggggttacacatactggatacgttggtggcttgggaggttttcttacggcgattggttttg

SEQ ID NO: 605 - DNA, 489 bp, Zea mays
atggtggtctcgctctggcacttcctccggcgcgccaagccggacctcttgttcgccgacacgttcgagtccgtctgcgacggcaccgtggtggtcggcccggtctgggaccacgtcctctcctactggcgtgcgagcgtggcggccccggacagggcgctcttcctcaggtacgaggacatgctgcgggaccccggcggcaacgtgcggcggctcgccgagttcatgggccgcccgttctcggccgccgaggaggccgccggcgacgtcgcggccgtcgtggagctctgcagcttcgacgagatgaaagggctggaggtgaacaggcctggtagcggcaccgcggggaggtaccgccccatgccgcgcgacgccttcttccggaagggtgtcgccggggactgggcgaaccacatgacgccggagatggcggcgcggctggacgggatcttccgtgaaaagctccaagggacggggcttatcttctca

SEQ ID NO: 606 - DNA, 285 bp, Zea mays
atgtcactgttaccactttcctcaaagatctgcatcagccaagttttgatggatttacttttgtctataactgtttcacttccaacctccaagcgaccgattaacttgggatcaatcttgtattttttcagcagagaattgacaaccgtcaaactcattgagatgacatcctccacctcgctgcaaaaggccatgcaatcttgcccaagcccaatggtgtacttccctttgctcgccccatcatgggcctcaagtgcctcctgctgcacgcaggagggcgggaag

SEQ ID NO: 607 - DNA, 558 bp, Zea mays
atggcggcgggcgggaatggcgccggcggggacaccagggcggccttcgcgcggatctacaagacgctcaaggaggagctgctcaccgacccggccttcgagttcaccgaggagtcacgccagtggatcgaccgcatggttgactacaatgtactcggaggcaagtgtaaccgtgggctctctgtggtcgacagctacaagctgctcaagggcgctgatgctctgggcgaggaggaaacgttccttgcttgcaccctcggctggtgcattgaatggcttcaggctttctttcttgtgcttgatgatatcatggatgactctcacactcgtcgcggccagccttgctggttcagggtgcctcaggttggcttaattgctgcgaatgacgggatcatccttcgcaaccatatctcacggatccttcggcgccactttaagggcaaaccttactatgctgatctccttgatttgttcaatgaggttgagttcaagacagcttcaggtcagctgctggaccttatcactacccatgaggggagaaaaagatctaacaaagta

SEQ ID NO: 608 - DNA, 828 bp, Zea mays
atggaggccgtggcgcgcagcggcgactacctttggcggttcgtggcggagacagagtggtacaacgaggttgtcctcagcgccgtggcgccaggcgactggtggcgcggcctgccgcacccggtgcagtcatggatgcgcaactgcgtcggcggttacctcctctatttcatctctggtttcctctggtgcttcgtcatctactactggaagcgccacgcctacatccccaaagatgccatccccacaaatgaagctatgaagaagcaaatagttgtagcatcgaaggctatgcctttttactgcgctcttccaactttatctgaatatatgattgagagcggatggactcggagctacttcgatatcagcgaaattggtttttctatgtacctctgttatatggctatgtatctcatctttgtggagtttggaatttactggatgcacagagagttgcatgacataaaaccattatacaaatatctgcatgcaacccaccatatttacaacaaggagaataccttgtctccatttgctggacttgcatttcatccactggatggtgttctgcaagcaataccacatgtgttcgcgctcttcctctttccaacgcacttcaggacacatattgcactcttgttcctagaggctgtgtggacaacaaacatccacgactgcattcatggcaagatatggccagtcatgggtgctggatatcacaccattcaccatacgacataccgccacaactatggccactacaccatctggatggactggatgtttggtacgctcaatgagccagaagatatcctcaagaaggct

SEQ ID NO: 609 - DNA, 735 bp, Zea mays
atggccattgccggcgctcttctcctcctgctcggactcctcgcgcgggaggccgctgccggcgggtggcagagcgcgcacgccacgttctacggcggcggggacgcgtccggcacaatgggcggcgcctgcgggtacggcaacctgtacagcacggggtacggcacgagcacggcggcgctgagcacggcgctgttcaacgacggcgcggcgtgcgggtcctgctacgagctgcggtgcgacaacgacgggcggtggtgcctgccgggcaccatcaccgtcacggccaccaacttctgcccgcccaactacggcctccccagcgacgacggcggctggtgcaacccgccgcgcccgcacttcgacatggccgagccggccttcctccgcatcgcgcagtaccgcgccggcatcgtgcccgtcgcgttcaggagagtgccgtgcgtgaagaagggcggcatccggttcaccatcaacgggcactcctacttcaacctggtgctggtgaccaacgtggcgggcgccggcgacgtgcgctccgtctccatccggggctcccgcacggggtggcagcccatgtcccggaactggggccagaactggcagagcaactcgtacctggacaggcaggcgctctcgttccaggtcaccgccagcgacggccgcaccgtcaccagcaacggcgccgtccccgctggctggcagttcggccagaccttcgagggcggccagttc

SEQ ID NO: 610 - DNA, 525 bp, Zea mays
atgtccaagtcgggagcgctggatcttgcttctggcctcggagggaagatcaacaaggtggaagtcaagtcggccgtcgatgagtatgagaaatatcatggatactatggagggaaggaggaagcaaggaagtccaactatactgatatggttaataaatactatgatcttgccactagcttctatgagtatggttggggtgaatccttccactttgctcacagatggaatggagaatccttacgtgaaagcatcaagcgacatgagcattttcttgccctgcaacttggtttgaaaccaggaatgaaggttttagatgtgggctgtggaataggtggaccactgagagaaattgcaagatttagctcaacttcagttaccggattgaataacaacgaataccagataaccaggggaaaggagctcaaccgtttagcaggaattagtggaacatgtgattttgtcaaggcggacttcatgaagatgccgttcgatgacaacacttttgatgctgtttacgcccat

SEQ ID NO: 611 - DNA, 192 bp, Zea mays
atgcggttccatgtgtgcgcctcgtcgccgcttgccggcaccggcaccggcaccgccaccgcctccaccacctcagccgccactcctgcgtccccgaccaacagtccctccatgatcgatctgaacgtggcgccgcagtccgaggaggtggagcactctgccgtgtcagatccccgcttcaatccaggtgcc

SEQ ID NO: 612 - DNA, 258 bp, Zea mays
atgcatcaatttcacagcttccctcatgaacaccgaagaatcggcgcccttccaacgggggtcggaatccgggaaaatctgcccgatgtccggcagccccagcgcgccgagaatcgcgtccaccacgcagtgcagcagcacgtctccgtcagagtgagcctcgcagccgcggtcgtgggggatgtcgatgccgccgatgatgagcgggaggttgggctccaggcggtggaggtcgaagccgtggcccacgcggaacgg

SEQ ID NO: 613 - DNA, 489 bp, Zea mays
atgagattcaacatgaaaacgggtgctgcttcacaaaagcaattgtctgtttctgctgtggattttcctcgtgttaatgagagctatactggcagaaagcagcggtatgtctactgcactatacttgacagcattgcgaaggtgactggcatcataaagtttgatctgcatgctgaaccggaaagtggtgtgaaagaacttgaagtgggaggaaatgtacaaggcatatatgacctgggacctggtagatttggttcagaggcgatttttgttcccaagcatccaggtgtgtccggagaagaagatgacggctatttgatattctttgtacacgacgagaatacagggaaatctgaagtaaatgttatcgatgcaaagacaatgtctgctgatccagttgcggtggttgagcttcctaatagggttccttatggattccatgccttctttgtaactgaggaccaactggctcgacaggcggaggggcag

SEQ ID NO: 614 - DNA, 504 bp, Zea mays
atggtgaccggcgccggcagcgaccaggtgttccgcgtcaaccactacccgccctgccccgcgctgcagggcctgggctgcaccgccaccgccacgggcttcggcgagcacaccgacccgcagatcatctccgtgctccgctccaacggcacgtccggcctgcaggtcgcgctccgcgacgccgcgcaggcgcagcagtgggtgtccgtgccctccgaccgcgacgccttcttcgttaacgtcggcgactcgttgcaggtgctgaccaacgggaggttcgagagcgtgaagcaccgggtggtgaccaacagcctcaagtccagggtttccttcatctacttcgcgggaccggcgctggagcagcggatcgcgccgctggcgcagctgctggcggagggcgaggagagcctgtacagggagttcacgtggggcgagtacaagacggccgcgtacaagacgaggctcggcgacaacaggctggcccagtttcagaggtgtagcatc

SEQ ID NO: 615 - DNA, 672 bp, Zea mays
atgtctagcctcggagtcacgtccatggccgtcgccgccgtgtactatcgcttcagctggcaaatggagggcggcgaggtgccggtgatcgagacgctgggcacgttcgcgctctccgtcggggcggcggtcgggatggagttctgggcgcggtgggcgcaccgggcgctgtggcacgcctccctgtggcacatgcacgagtcgcaccaccggccgcgcgagggccccttcgagctcaacgacgtgttcgccatcgtcaacgccgcgccggccatctccctcctcgcctacggcttcttccaccgcggcatcgtgcccggcctctgcttcggcgcgggcctggggattacgctgttcggcatggcctacatgttcgtccacgacggcctggtccaccgccgctttccggtcggccccatcgccgacgtgccctacttccgccgagtggctgcctcgcacaagatacaccacatggacaagttcggcggcgtcccgtatgggctcttcctgggaccaaaggagctggaggaggttggtggcctggacgagcttgttagcagtccggtgagtgaagctactgatactgaagacgcaggagaagaaaagacgcgtccagttgtatgcgttgtccgaacaagcgtgttcatgggccagagtgtgccaaatgagttc

SEQ ID NO: 616 - DNA, 1317 bp, Zea mays
atggtcgccgagatggagcgcggcctgcgcggggacatccacgcgcagctcaagatgctcattagctacgtcgacagcctccccaccggagatgaacatgggctgttttatgcactggatcttggagggaccaacttccgtgtgctgcgagtccagctaggaggaaaggagaaacgtgttgtcaaacaacagtatgaggaggtttccattccaccacatttgatggtcgggacttccatggaactatttgatttcattgctgctgcattggctaaatttgtcggtactgaaggtgaagatttccaactcccagagggtaggcagagagaacttggtttcactttttccttcccggtgaaccaaacatcaatatcatcaggaacactcatcaagtggacaaagggcttttccatcaatggcacggttggtgaagatgttgtttctgagttgagcagggccatggagaggcagggactagatatgaaagctacggcattagtcaatgatacagtgggcacattggctggtgggagatatatggataccgatgtagttgcagctgtaatattgggcactggtacaaatgcagcatatgtggagcatgcaaatgcaattcctaaatggactgggttactgcctaaatctggaaagatggtaattaatacagagtgggggagcttcaaatccaacaaacttcctctttcagaatatgacaaagccatggactttgaaagtttgaaccctggagagcagatatacgagaaaatgatttctggtatgtatctcggagagattgttcgaagaattttactgaagttggcacatgaagcttctctatttggggatgttgttccacctaagctggagctgccatttatattgaggacgccagatatgtcagccatgcatcatgactcctcacatgacctcaaaactcttggagctaaactgaaggacatagtcggggtcgcggacacttccctggaagtaaggtacatcactcgtcacatctgtgaccttgtcgcagagcgtgcagcacgcctggccgccgcaggcgtgtacagcatcctgaagaagataggccgggacaaagtaccaagcggtggcggtaaaatgccgaggaccgtagttgccttggacggtgggctctacgaacactacaagaagttcagcagttgcgtagaagcgactctcacagacttgctcggcgaggaggcttcttcctccgtggtcgccaagctggccaacgacggctctggcattggagctgcgcttctcgcagcctcacactcccagtatcagtatggcgcgagtgac

SEQ ID NO: 617 - DNA, 981 bp, Zea mays
atgaagaagcagcgccgccgagggggcacggcgtcagcagcggcgcgggggtctggaggggagggcggcggggcggacgctgcgttgcagcggcagctgcagcagctgttccacctccacgactccgggctggaccaggccttcatcgacgcgctgccggtcttcgcctaccgcgagatcgtcgtgggcggcggcggcgacggggacaaggagccgttcgactgcgcggtgtgcctgtgcgagttcgacgccgaggaccggctccggttgctgccgctgtgcgggcacgccttccacctcaattgcatcgacacgtggctgctctccaactcgacctgcccgctctgccgcggggtgctcttcgtcccggggctcatgggcgaggacagcccgatgttcgatttcgaggagggcctggaggaagggcggttgtccgaggactgtgacgacggatttggattgcctgggctgaaggcttcagggttggcacagacaccggtggccgagaagaaggtattccctgtgaggttggggaagttcaagaatgtcggaacccatggtgcggtggaaggtggccatgccaatgccaatgccaatgccaatgctaatcccagggtgttgactagggatgaaggggagagtagcagcagcaggttggatggaaggagatgcttctccatgggcacctatcagtatgttcttggcacatctgagctccgggtagctctccagcctggctgtatcaggaatggcactggtggtgcaatgaggggaatgcctcctggtttaagttcaatcaatgctgatattatggaggggaagaagatctgtgcacgcaacaaaggggagagtttctccgtgtcaaaaatttggcaatggtctaatcttaagggcaagctacctgctggttctgatgaatgttcggatgctgggagccttccatggatgaagaaaggaggtgctgtggatacatcgaactta

SEQ ID NO: 618 - DNA, 1002 bp, Zea mays
atgttcctggcggtaatccgcgcgcgcggcgtggcggcgccgctcaacccggcctacacgcaggaggagttcgagttctacctctccgactcggaggcgcgcctcctcgtcaccaacgtcggagggcaacgcggcggcgcaggcggccgctgccaagctcggcctcgcccacgccgccgccagcctccacgacgcggccggccctgtccacctcgccggcctcccggcccatgctccggagaacgggtcccacggcggcggcgcggcgggctctctctcccccaacgacccgtcggacgtggccctgttcctgcacacctccggcacgacgagccggcccaagggcgtgccgctgaagcagcgcaacctggcggcgtcggtgcggaacatccggtccgtgtaccgcctcgccgagacggacgccacggtggtggtgctgccgctgttccacgtgcacgggctcctctgcgccctgctgagctcgctggcttcgggcgcgtccgtggcgctgccggcggcggggcggttctcggcgtccacgttctgggccgacatgcgggcgtcgggcgccacctggtacacggcggtgccgacgatccaccagatcatcctggaccggcacgcgtcgcggccggaggcgtacccggcgctccgattcatccgcagctgcagcgcgtcgctggcgccggcgatcctggagcggctggaggcggcgttcagcgcgccggtgctggaggcgtacgcgatgacggaggcgtcgcacctgatgacgtcaaacccgctgccggaggacgggccacggaagcccgggtcagtggggcgcgcggtggggcaggagctggcggtgctggacgaggaggggcggctcgtggcggcggggagccccggggaggtgtgcgtccgcggggacaacgtgacggcgggttacaaggggaacccagaggcgaacgaggcggcgttccggttcgggtggttccacacgggggacatcggcgtggtgga

SEQ ID NO: 619 - DNA, 693 bp, Zea mays
atgctccgcaagcacacctacttcgacgagctcgcgcagaacaagcgcgccttcgccgccgcgtccgcgtccgcggccaccgcctcgtcgctggccaacaacccttcttcctacgcgtcgctctcccccgcgaccgcgacggccgccgcgcgggagcacctcttcgacaagacggtcacccccagcgacgtgggcaagctgaaccggctggtgatcccgaagcagcacgccgagaagcacttcccgctgcagctcccatccgccggcggcgagagcaagggcgtgctcctcaacctggaggacgccgcgggcaaggtgtggcggttccgctactcgtactggaacagcagccagagctacgtgctcaccaagggctggagccgcttcgtcaaggagaagggcctccaagccggcgacgtcgtcggcttctaccgctccgctgccggcgccgacaccaagctcttcatcgactgcaagctgcggcccaacagcgtcgtcgtcgcctcgacggcaggcccgtcgcctccggcgccggtggcgaaggccgtgcgtctcttcggcgtcgacctgctgacggcaccggccaccgccgcggcgccggcggaggccgtggccgggtgcaagagagccagggacttgggttcgcccccgcaggcggcgttcaagaagcagctcgtggagctggcactagtg

SEQ ID NO: 620 - DNA, 1689 bp, Zea mays
  misc_feature (911)..(911): n = any nucleotide
  misc_feature (931)..(931): n = any nucleotide
atggcggacgtgcacgaacctttggtgcgccgtaagaggaagaaggttttggtggactacttggtgaagttccgatggatcctcgtgatcttcgtggtccttcctatttcaactctgatctacttcaacatcttcctgggcgacatgtggtccgccatgaagtcggagaagaagcgccagaagcagcacgacgagaacgtgcagaaggtcgtgaagcggctcaagcagaggaacccgaagaaggacggtcttgtttgcacggccaggaagccctggatcgctgttggcatgcgcaacgtggactacaagcgtgcgaggcatttcgaggtcgacctttcttccttcaggaacatccttgagatcgacaaagagaggatggttgccaaggtcgagccccttgtcaacatgggtcagataaccagagctacctgcccaatgaaccttgcccttgcggtcgtcgccgagctcgacgacctcactgttggtgggctgatcaacggttacggcatcgaggggagctctcacctctatggccttttctccgacacggttgtcgcgatggaggttgttctcgcagatggccgggtcgtcagagccaccaaggacaacgagtactctgaccttttctatggcattccctggtcccagggaacactggggttccttgtctctgcggagatcaagctgatccccatcaaggagtacatgaagctcacctacactccagtcaaggggggtctaaaggagatcgcgcaggcctacgcggattctttcgcgccgagggacggtgacccggcaaaggtccctgactttgttgaagggatggtgtacacagagagcgagggtgtcatgatgacgggcgtgtacgcttccaaagaagaggcgaagaagaagggcaacaagatcaactngcgtgggtggtgggttaagncctggttctaccagcacgctcagacggcgctgaagaggggcgagtttgtggagtacatcccgacgagggagtactaccaccggcacacccggtgcctgaactggggaggggaagctgatcctgccccttcgaggaccagttctggttcaggttcctgctgggcgtggttgatgccaccgaaggtgtccctgctgaaggcgacccagggcgaggctatcaggaactactaccacgacaaccatgtgatccaggacatgctggtgccgctgtacaaggttggggatgcgctggagttcgtgcaccgcgagatggaggtgtatcctctgtggctgtgccctcaccggctgtacaagctgccggtgaagacgatggtgtacccggagcctgggttcgagcaccagcacaggcagggcgacacgagctacgcacagatgttcacggacgtgggcgtgtactacgcccccggggcggtgctgaggggggaggagttcaacggcgcggaggctgtgcacaggctggagcagtggctgatcgagaaccacagctaccagccgcagtacgcggtgtcggagctgaacgagaaggacttctggcgcatgttcgacgcgtcgcactacgagcactgccgccaaaagtacggggcggtgggcacgttcatgagcgtgtactacaagtccaagaaggggcgcaagacggagaaggaggtgcaggaggcggaggcggccatactggagccggcctacgcggacgaggaggcc

SEQ ID NO: 621 - DNA, 513 bp, Zea mays
atgatgttcttccggaacgaccggaccggtgggccatcccacccacctgagccttggcggcgcgcggcttctcggcggggtcagccagcacggcggcggcggcggcggcgacgctgctctggctcggggaccgcttcatcttcccggcctcctcctccttctcaagggcaacagcaacgccgtggtcctcctcctcctcctccgcctccacgacggccgctggctccagcttcagcttcaggtcgatggtctcggcgaagcccctcttgccggaggcggaggaagagctcctcccctcgccgcccagcgccggctcccctccacctcccccgccgggcaggcccaggcggagctccgtcgcctcgaaccccaggtccgtcgtcgtcgccatcgcggctgccgtcgtcgccacgtcctcgcctctctctcaattctgcttggcttgcttcttcttcgtctgttagctgcctagctctgttccgagagcgagcgaggctctggcgctctgcaatg

SEQ ID NO: 622 - DNA, 1434 bp, Zea mays
atgacttccctctcctccgcggtggcactgccgtcctcgtgccgggcccggccggcggggggcagccggagggcgcggatggtggtgacgcgcgcggcggcgtcgagcccgaagctgccgaacgggcggcggctgcgggtggctgtggtgggaggcggccccgccggtggcgccgcggcggaggcgctggccaagggcggcgtggagacggtgctaatcgagcggaagatggacaactgcaagccctgcggcggcgccatcccgctgtgcatggtgtcggagttcgacctgccgctcgaccttgtggaccgcaaggtgaggaagatgaagatgatttcgccgtccaacgtcgccgtcgacatcggccgcacgctcgcgccccacgagtacatcgggatggtcaggcgcgaggtgctcgacgcctacctccgctcacgggcacagtccgtcggcgcggaggtcgtcaacggcctcttcctaaggtacgaggcgcccaaagagccgaacggctcgtacgtggtgcactacaaccactacgacggcagcaacggcaaggtcggcggcgagaagcggtcgttcgaggtggacgcgatcgtgggcgcggacggcgccaactctcgcgtggccaaggacatgggcgcgggcgactacgagtacgccatcgcgttccaggagcgcgtcaagatccccgacgacaagatggtgtactacgaggagcgcgcggagatgtacgtcggcgacgacgtctctcccgacttctacggctgggtgttccccaagtgcgaccacgtcgccgtcggcaccggcaccgtcacgcacaagcccgacatcaagaaatttcaggccgccacgcgcctccgcgccaaggacaagattgagggcggtaagatcatccgcgtcgaggagcaccccatccccgagcaccccaggcctaagagggtgtccgggcgggtgacgctggtgggcgaaccccgcggggtacgtgaccaagtgctccggcgagggcatctacttcgcggcgaagagcgggcggatgtgcgccgaggccatcgtggcgggctccgccaacgggacgcggatggtggaggagagcgacctgcgcaagtacctggccgagttcgaccgcctctactggcccacttacaaggtgctggacatcctgcagaaggtgttctaccgctccaacgcggcgcgcgaggccttcgtggagatgtgcgccgacgactacgtgcagaagatgaccttcgacagctacctctacaagcgcgtcgtgccgggcaacccgctcgacgacatcaagctcgccgtcaacaccatcggcagcctcgtcagggccaccgcactgcgccgggagatggagaaggtcaccttgtgagccgccgcccgcgacgtcattgccgtcgaaatggtgtcgcagctgatcggccggtgtat

SEQ ID NO: 623 - DNA, 774 bp, Zea mays
atgaggtgccctgggtgccagggctcaggtatgaaagtcaccattcgtcagctggggccttccatgatacagcagatgcagcagccttgcaacgagtgcaaggggactggggagagcatcaacgagaaggaccgctgcccagggtgcaagggtgagaaggtcgttcaggagaagaaggttcttgaggttcatgttgagaagggaatgcaacacagccagaagatcaccttccctggtgaagctgatgaagcgcctgataccgtcactggagacattgtattcgtcctccagcagaaggaccactccaagttcaaaagaaagggtgaagatctcttttatgagcacaccctgtctctgaccgaagctctatgtgggttccaatttgttcttacacacctggacaacaggcagcttctgatcaaatcaaaccccggcgaagttgttaaacctgaccaattcaaggcgataaatgacgaggggatgcctatttaccagaggcccttcatgaaggggaagctctacattcatttcacggtggagttccccgactcgctggcaccagagcagtgcaaggctctcgagtcggtacttccgccaaagccttcgtccaagctgacagacatggagatagatgaatgcgaggagacaaccatgcatgatgtgaacaacatcgaggaagagatgcgcaggaagcaggctcatgctgctcaggaggcgtacgaggaggacgacgagatgcctggcggagcccaaagagtgcagtgcgctcaacag

SEQ ID NO: 624 - DNA, 411 bp, Zea mays
atgttttcttcatactatatatgtcttcgtctgtgtctcctacccccctatccctctcttctttctatctcactctctcaccctttcccccccccttttcctccctctccttctcttttttatacttctctctttcctacctcccaatccttccttctctccaccctctctcttcattatacttttctttcccgctccttttttctccttcactcccctttcttccccctcccccccccctcacctccatcaccctccccttccccatccctacctcctcctccttctcatcgtctctcccctcctaccccaccattcttacttatcttcccaccttccccctatcctcaccctccctcatttcctctcctccccctcccccctcctcacattctttcccctctccacacc

SEQ ID NO: 625 - DNA, 528 bp, Zea mays
atggaggcggcgacgatggtgtggacggcggcggtggtcggggcggggctggtgtactggttcgtctgggtgatgggcgcggcggaggtgaagggcaagcgggcggtggatctcaagatgggatccatcacgcgggacaaggtgcaggacaagtacacgcagtactggtccttcttccgccgccccaaggagacggccaccacggcggcgtcggcggagaaggtgccggccttcgtcgacaccttctacaacctcgtgaccgacatctacgagtgggggtggggccagtccttccacttctccccgtccctccccggccgctcccaccgcgacgccacgcgcgtccacgaggagcgcgtcgccgacctcctcggcgccaggccgggccaccgcctcctggacgtcggctgcggcgtcggcgggcccatgcgcgccatcggcgcgcactcgggatccaacgtgggtcgggatcaccatgaacgagtgccaggtgaaccgcgcgcgcgcgcacaaccgaaaggatcgact

SEQ ID NO: 626 - DNA, 648 bp, Zea mays
atggatctgttggagcggaatattaagacggagacggaggagacgcgcaaggaacaggagcgtaaggaggaggaggcggaggcggaggcggaggcgggggagaggaagacccaggagccgccgcagcaaggccagggcctcagcctctcactcgccaacggcagtggcaggtctggaatgttgccgatgtcgaacgtgtccgctaatccttcacagcttacaattttctatggcggatcagtatgtgtgtatgactcagtgccaccggaaaaggctcaagcaatcatgcttatagctgcagctgcagcggcagcggcagctaccaaaagcagtgctgcccctactgttaagcctccaatggtgcctgcagccactgttgccccagcagctgtcgtttctcctgtgcttacacggtctccatcactgcagagcacttctgtagcaactgggcaacctcaggttgttgctgaacctagctcgatatgcaaacttcaggctgatctccccattgccaggaggcactctcttcagcgtttccttgagaaacgccgtgacagggtcgtgagcaaagctccatacagcaccgccaagtcgtccgatggcatggagtcaccgaggattgaggtgacagcggagggcaaggcccag

SEQ ID NO: 627 - DNA, 675 bp, Zea mays
atgccgttcctgcggggggtggacgtgaaccgggcccctgccggggataccaggaggggtagctgcagcgaggacgacgaggagcctggcggcgcgtcgtcgtcgccaaacagcacgctctccagcagcctcagcgggaagcgcgcagctccggcgaggagcggcggagaggtggccgaccacaccccgagagccggaggcggcagcgacgacgaggactccggcggtgggtcgcgcaagaagctccgcctgtccaaggaccaggccgccgtcctcgaggagagcttcaaggagcataacacactcaaccccaagcagaaggcggcgctggcgaagcagctgaacctgaagccgcgtcaggtggaggtgtggttccagaaccgcagagccaggacgaagctgaagcagacggaggtggactgcgagttcctgaagcgctgctgcgagacgctgacggaggagaaccggcggctgcagcgggaggtggcggagctgcgcgtgctcaagctcgtggcgccgcaccactacgcgcgcatgccgccgcccaccacgctcaccatgtgcccctcctgcgagcgcctcgcctccgcgtccgcgtccgccgaccaggcgggccgtgcagggccctgctggggccctctccccgtgttcgtcgacggcccagcccggaggccg

SEQ ID NO: 628 - DNA, 807 bp, Zea mays
atgacgcccgagaggaggatggcgatctgggcaatatacgtgtggtgcaggagaacggacgagctcgtggacggccccaacgcgtcccacatctcggcgctggcgctggaccggtgggagtcgcggctggaggacatcttcgccggccggccgtacgacatgctcgacgccgccctgtccgacaccgtcgccaggttccccgtcgacatccagccgttcagggacatgatcgaggggatgcgcatggacctgaagaagtcccggtacaggagcttcgacgagctgtacctctactgctactacgtggccggcaccgtggggctgatgagcgtcccggtgatgggcatctcgccggcgtccagggcggccaccgagacggtgtacaagggggcgctggcgctgggcctggcgaaccagctcaccaacatcctcagggacgtcggcgaggacgccaggaggggacggatctacctcccgcaggacgagctggagatggccggggctctccgacgccgacgtcctggacggccgcgtcaccgacgagtggaggggcttcatgaggggccagatcgcgagggccagagccttcttcaggcaggcggaggaaggcgccaccgagctcaaccaggagagccgatggccggtgtggtcttctctgctcctgtaccggcagatcctcgacgagatcgaggccaacgactacgacaacttcacccggagggcctacgttccgaagacgaagaagctgatggcgctgcccaaggcgtacctgagatcactggtggtgccctcctcctcttctcaggc

SEQ ID NO: 629 - DNA, 480 bp, Zea mays
atgcagcacgtgacgcagctgtcgttcctcctgctggcctactccaactacctgagccacgccggcgggcgcgtctcgtgcggctcgtcgtcggcgtcgccggtgcagctccgccgcgtggccaagcggcaggtggactacatactgggcgacaacccgctgcggatgtcgtacatggtggggtacggcgcgcggttcccgcggcggatccaccaccgcgccagctcgctgccgtccgtggcggcgcacccggcgcggatcggctgcaaggccggcgccgcctactacaccagcccggcgcccaacccgaacctgctcgtgggcgccgtcgtgggcgggcccaccgacgactccgacgccttccccgacgcgcgcgccgtgttccagcagtccgagcccaccacgtacatcaacgcgccgctcatgggcctcctcgcctacttctcggcacatcccaacccagccgagtcgggcggcgac

SEQ ID NO: 630 - DNA, 138 bp, Zea mays
atggcggctgccggtgctgctcgcgcgccgacgaggtcccggagcccatgtaccgcccggagcccaccgaggtccacaactgaagccgagccacacatcgatctacaaagatgcatggacgacgactcttatcttagc

SEQ ID NO: 631 - DNA, 534 bp, Zea mays
atgctgtgtccatgcatgcatcatgttctcgtatataatgtcagtggcacgttcgttcgatcgtccgcgtgtatatctcagtatctcgtgaaggagaaatccagtgaccccgcgcggcctgccggttcttgcgttgcagcgttccagtacagctcggcgcactcggtgctggaggtgagcgaggcggaccacggcgcgtgctcggcgagcaacccgctgcggtcgcaccagggccagagcaccaccatcccgctcaccaaggccggcacccgctacttcatctgcggcgcccccggccactgcgcctcgggcatgaaggtcgccatcaccgtctccggcggcggcggcggcggcagcagcagcgccgacaacaccgcgactccgtcgggtccctccgtgcgggcgacgaacacgaagccggcgtccggtggcgcgacgacgacggacgagtcggactccagcgcggctggcagcggcgcccgcctcgcgatgggcctgctgttcggggccgcgggcctcgctgcaataatgggc

SEQ ID NO: 632 - DNA, 453 bp, Zea mays
atgagaattgaagatgcaggatgcaagcatgcaggtgtgctgctcgcgtcgcgcgcgcgtgcgcatgcggtggcaacggggcctcgatctctctcacgtactctcagtgatgcaaggggttggggcccgaaggcaccagcctcttctgcacgccgtaccgcggatcgatcatcgcctcgtcaccctcgccgccagctgctgacggtggaagagtcccgtgccggttccatcgccggtccgcgtggtggtggtggtggtggtggtgttgatgatgaagatggtggtggtggtggtggtgaagaagatagcggtggttgtaaccagcagctgacgaggacgaggcagcgtcgaagcttgtcatggcgagcagcatcttcctcgggacggcggcgggccacctcgccggcctcgtccccgccaggccgccgccgttcccgtggatcaacgcggctg

SEQ ID NO: 633 - DNA, 573 bp, Zea mays
atgaagctttatccgtgcccccgtgacatgatggcattcagtgcctgcaacaggcccttaccaaacctcagggcggagctcaccagtagccgggggcatccatttcccagagttgtacacgctctcgccgaccttccaccctggaacgtctttcatgatcctcgcctcctcctcaagacacttcttccactctttgacaaatctttcatcctcttctgcttggagcatcggcagtatagcactgcgagcagcaattttctcttctttgagcgctcggcggaccttgttcccctggccgacctggtacatgccatatgcgaaagcaccgaaggtggtgaggaagatggcggtggcgctgggccccgaggtggggatccggcgggcgaagcgcacgggcgcgaaaccgcccggcggcggcccgtcctgcaccaccggcatctccttgatgctggccatccccggcttgttccgcaccagggactccgtcatcttcggtcccggatccggacgccggtacgcacgcttggcggaactagagctccccgcggggatcaaacgagccgaggctgtcgc

SEQ ID NO: 634 - DNA, 492 bp, Zea mays
atgcccccgccggcagctaccggccggtgtgcgacacggtggtgttcgtctgcctcgcgtccgcctccgccctcatcgtgttcatggtggccgtctgcttccgcaacgccttcgccgccaacgggtacgcgaccgctgccgtggccacaaacggtgccgccggagccaccgctgccaacggcagaagccggtgcgggctggcgccgtccgcgctgtcggcgatccccgtgctcgcttaccgccggaggggcgccgggtgggcgcagtgcgcgatctgcctcgccttggtgcgggacggggagacggtgcgattgctgccggcgtgcggccacctattccacgtcgagtgcatcgacctgtggctgcgctctcacgcaacatgcccgctttgccggcgtggcgtcgtcgaggctcccgtcgaaaaggtttgaaagctcgccgctcttggccccaaaaaaaaaaaaagccaagatcacacgctggctgctatac

SEQ ID NO: 635 - DNA, 951 bp, Zea mays
  misc_feature (681)..(681): n = any nucleotide
  misc_feature (723)..(723): n = any nucleotide
  misc_feature (738)..(738): n = any nucleotide
  misc_feature (808)..(809): n = any nucleotide
  misc_feature (825)..(825): n = any nucleotide
  misc_feature (841)..(841): n = any nucleotide
  misc_feature (860)..(860): n = any nucleotide
  misc_feature (882)..(882): n = any nucleotide
  misc_feature (888)..(888): n = any nucleotide
  misc_feature (931)..(931): n = any nucleotide
atgaagaacctgtctgtgaaggagctgcggcagctggccgacgagctccggtccgacgtcatcttccacgtctccaagaccggcggccacctcgggtccagcctcggcgtggtggagctcaccgtcgcgctgcactacgtcttcaacgcgccgcaggaccgcatcctctgggacgtcggccaccagtcgtacccgcacaagatcctgacggggcggcgcgacaagatgccgacgatgcggcagaccaacggcctggcgggcttcaccaagcgcgccgagagcgagtacgacagcttcggcacgggccacagctccaccaccatctccgcggcgctcgggatggcggtgggccgggacctcaagggcggcaagaacaacgtggtcgcggtgatcggcgacggcgccatgacggccgggcaggcgtacgaggccatgaacaacgccgggtacctggactccgacatgatcgtcatcctcaacgacaacaagcaggtgtccttgcccacggcgacgctcgacgggccggtgccgcccgtgggcgcgctcagcagcagcgccctcagcaagctgcagtcaagcaggccgctcagggagctcagggaggtggccaagggagtgacgaagcagatcggtggctcagtgcacgagctggcggcgaaggtggacgagtacgcccgcggnatgatcagcgggcccggctcctcgctcttcgaggagctcggnctctactacatcggncccgtcgacggggacaacatcgacaacctcattaccatgctcaccacctcaagagcccaagacccccggnncccgcctgatcaccgngggcacccaaaaggcncgcggctcctcccaccgtnagcgagtctcctacagtgcccnggagangtgtactccgctcccgggggccgggcaggcagcgcagcgcgcnggttgcatcgggtgttccgt

SEQ ID NO: 636 - DNA, 720 bp, Zea mays
atggcaaggcggcgcggggcccgcgggccgcgtgtctggccacctgcccagctgggcgcgcacgtggggcgaaagagacggccttggcccggctcgctaggtgcagggaggcgccgccgcctgggccgggccgtgggagagccagcgggtgaaggcgtccagcgtgcgggtgtcggcgcggtagtggcgctgcgtgaagcgcatgaggtcggcccaggtgaagtccgggtagcgccgcggcgcagcactggccggcgggcgcaccacccggtcctcgcgcgggcacaggaagaaggccagcgaccgccgcgcccgccgctggttcaccaccgcgcggtgcaggcagctcttgtacctcccgttcgacagcgcctgcatggcatgcgggttagcacagtgcacaagaatcatcgtgtcgggctgtctcattgttgcggtgcgcccggctggcgggccaggccgcgacaaccggacgcgtgcaagtgcctgccacccacacggccaagggcccgagctgtttggagccccggcgtggtgtgggcgccgcgtgccggatcgccagcgaaaccgcgacaaaagtgcaagcggaaacggcgggggcaacagcagccaccacgtaccggtgacccgatccaacccaacccgactccaaccaaccttgtactatatactatacattatactccgcgcgacggccctccgcgcccgtgcggcatcgca

SEQ ID NO: 637 - DNA, 219 bp, Zea mays
atggtccagaacaggatggtcgtcgcccacaccggcatcaggcgggccaccatcttaacctcctcgacgcgggacacggagcacagcttccacgggttcggcgtcggccgcccgtcgtgccccacctcgttgtcgtcgtcccctgccatcaccgccgccctgtcgaggcacgggaactgggcggtgtgggggatgcgcgcgtgctcggggcggtcctcg

SEQ ID NO: 638 - DNA, 255 bp, Zea mays
atggaacttcatctctggttccatttgagttccccggaggcaccggcagtgaaaataatgcgcatgcaaaacgtgccagagctgattcccatatttttccttttatgttgttttgaccttcttcctcataacgaccatcgtcataaacccaaaaatgagtgtcacggggacactgaacatttgcaaccttcagaactttcagctcaatctttgttatctcccttccgttcatataaacctgggtgtttccgttac

SEQ ID NO: 639 - DNA, 477 bp, Zea mays
atggctaactatattaaataccaagcggacaatggggcgcaggctgtccaaattttcgattcatgggctactgaactcagcccgcttgattttgaggagtttagcctgccttatctaaagcagatagtggatagtgttagggaaacacatcctaacttgcctctgatactctacgcaagtggatctgggggcttgctggagaggcttcctttgacaggtgttgatgttgtcagcttggactggacggtcgatatggcagagggcaggaaaagattgggatctaacacagcagtccaagggaacgtggaccctggtgttctttttggatccaaagagtttataagcaggcggatttacgacactgtgcagaaggctggcaatgttggacatgtattgaaccttggccatggcatcaaggttggaactccggaggaaaatgttgctcacttcttcgaggtcgcaaaagggatcagatac

SEQ ID NO: 640 - DNA, 528 bp, Zea mays
atgtggcgcctgcggatcgcggaggggggcggggacccctggctccgcacgaagaacgcccacgtcggccgccaggtctgggagttcgacgcctccgccgaccccgaccccgccgtcgacgccgcgcgccgcgccttcgccggcagcaggggccacctcaagcacagcgccgacctcctcatgcgcatccagttcgccaaagaaaatcctcttgagcttgaccttccagcgatcaagctcggtgagcacgaagacgtaaccgaggaagccgtgtctactactttgagaagggcaatcagccgtctttctactctccaggcacatgatggacactggcctggggattatggtggccctatgttccttatgccaggcttgatcataacattgtatgtgactggagcactaaacactgtcttgtcatcagaacaccagaaggagatccgtcggtatctttataatcatcagaatgaagatggtggctggggcttgcacattgagggtccagcaccatgtttggctcagcac

SEQ ID NO: 641 - DNA, 750 bp, Zea mays
atgaggttcagctgcagcacaggggatgccatggggatgaacatggtctccaaaggtgtacagaacgtgctggactacctccaggctgacttccctgatatggatgtcatcagcatatcaggtaacttctgttctgacaagaagtcagctgctgtgaactggatcgatggccgtgggaagtcggtggtttgcgaggcggtaatcaaggaagaagttgtgaaaaaggttctcaagacaaacgtacaggctctcgtagaattgaacgtgatcaagaaccttgccggttcagctgttgctggagctcttgggggtttcaatgcccatgcaagtaacattgtggcagccatcttcattgctactggtcaggaccctgcacagaacgtggagagttcccagtgcatcaccatgttggaagctataaatgatggcaaagatctccacatctctgttactatgccatctattgaggttggcacagttggtggaggcacgcagctggcctcacaatctgcctgcttggacctgcttggcgtcaaaggtgccaacagggaatctccggggtccaacgcgaggctcttggcccacgtggttgcggggtgcggtcctagctggggagctgtcccttatctctgcgcaggccgctggccatctggtcaagagccacatgaaatacaacagatccagcaaggatatgtccaagacccttgcagaggaaacagacaaacccaagaaatgctgaataatatcaag

SEQ ID NO: 642 - DNA, 330 bp, Zea mays
atgccaggcgtactcaggcgcaaggtagcctgttgttcccgcgacgcgggtgctgatgtgggtgacattgtcaggaaacagcttggccagaccgaaatccccgatcttggggacgtagttcctgtcgagaagtatgttgctggccttgatgtctctgtgcacgatcggcgccgcgatctcctcgtgcaggtacgcaaggccccgaacgactccgaggcatatagcagacctgacgctccaggtgaagtcggcaggctcactgttagaagctgcagaacgccgcaactgatggatcaggtaggtaggtatgggtatgggtatgggtttggg

SEQ ID NO: 643 - DNA, 462 bp, Zea mays
atgcgcgggggcaggtcccccgtggagctggacgccgcgctggccatgttctgcgagggggtctcgcctttcgggcccgtctgggagcactacctcgagtactggaaggagagcctggcgaggcctgagcgggtccttttcctcaggtacgaggagatggtggcggacccggtgcgtgccgtgaggacgctcgccggcttcttcgccgtcccgttcaccgacgaggaagaggggcgaggggtcccggaggagattgtgaggctgtgcagcttcgagatgctgagcggcttggaaagcaatcggaccggagatcttgattgcggagacaacacggtgatcggaaaatctaccttcttcaggaagggcaaggttggggactgggagaaccacttgacaaaagagatgggcaagaaggtcgacgccgttttcgaagacaagctccagggatctggtctcgtgttt

SEQ ID NO: 644 - DNA, 531 bp, Zea mays
atgcgtgaaaaacttgctgttgcagaggaactgtggccccgtgctattcaagaactcactagcctgaaccatattgaagaggctgctgttcttagtacctgtaatagaatggaaatttatgtggtggcgctatcatggaaccgtggtatcagagaagtagtggactggatgtcgaagaaaagtggtattcccgcttccgagcttagggagcacctgttcatcttgcgaagcagtgatgccacacgccatctgtttgaggtgtcagctggccttgactctttggttctcggtgaaggacaaatccttgctcaggttaaacaagttgtgaggagtggacagaacagtggaggcttgggaaagaacatcgataggatgttcaaggatgcaatcactgctggaaagcgtgtccgcagcgagaccaacatatcatctggtgctgtttctgtcagttcagcggcggttgaactggccctgatgaagcttccgaagtctgaagcactgtcagctaggatgcctcctgattggtgctgg

SEQ ID NO: 645 - DNA, 813 bp, Zea mays
atgaaggtgccgtggaacccgaagggcacgcgggacggaagctggaccgtggcccccaaccgcatgtcgggggaattgaccaaaagtagctccgacgtgccggcgcgctcgtcgtggacaaaggtgagcacgtacccgtcgtcctccccgcgcggggtgggcccgcggccgggtccatgggccacgaagcatggctcgccggccgaaccggcccctcggccgtactcgaacttggtgagctcgcccgtggacaggtccaccttggcgaagcccgacaccttggcccacggctccgccaccgcgaggtacgcgtaccgggtctcgcggcccagcaggttgcggttcaccatgcccacctccaggttcacctgctgcgacggcggcaggacggcgcggcgcgtggaccggcccgtgcgcgcgtccaggcggatctccgtcagcacgctctccaggcgctcgtcggactcgttgaagatggagtcggcgggggtcatgcaggagccgatcaccaccacctcgcccgtcgcctcgtcctcccacgcgttccacaggtggaagcagaagcagtccggcacgtccacccacgccatctccgacgcgtccgcggcgtgcttggggagcacgccgaaccgcgacgtcttctccttgtccagcaccacgggcgacccgccgcgcagcatctcctggagcttgaacaccacctggtggtcgggcacaaccacgaagttctcggtgatggcgaagtcgtggatcatcgtaggctgctccagcgggatctccacgtcgtcggacttggtgccgtcgggcctgaag

SEQ ID NO: 646 - DNA, 678 bp, Zea mays
atgtcccccacggaagaagccgctggtggtggtggcgacgactatgaccgcttgagcgagctgaaggcgttcgacgacagcaaggccggcgtcaagggcctcgtggacgctggcgtcacgaccatccctgccatcttccgcggccatctccttcaggaagggccgaaggtatcgtcctctagcagtagcagcagtactagtcttagcattatcccggtcatcgacctctcggcggcggacgcagtcgcacgggaggaggtggtcgcccagttgaaggctgcagccgagacggtggggttcttccagctggtgaaccacggcgttcccagcgagctcctgtgcgagatgctgccgtcggtgaggcggttcaacgaggagccccacgaggtgaagcggccctactacacgcgggacgcacgtcgcaaggtgcggttcaactccaacttcgatctgttccagtcgccggcggccaactggcgcgacacgctcttctgcgaggcagcgccggagccgccgcgggcggaggagctgccggtcgccgtcaggcacgtgatgctggagtacggcggcgcggtgcgggaggtggcggcacgcgtgctggggctgctctcggaggccctggggctgacccccgggcacctcacaggcatggggtgcgcggagggtctcactctggtg

SEQ ID NO: 647 - DNA, 249 bp, Zea mays
atggaggaagtagtagtcgccccagtccagcgggccgcccttggcggtgccgaggcggctgccgtagccctcgtacgtcgccggcgagttcgcgtaacgctcgcgcacctccgcgggctgccggaagaagccacgccacgccgcgcgcgcgccgcgcagcagctccgggcggacgccgtggttcactgcctggaaaaagccccactcccggcacgccgccgccacggcgctggatgtcgcgtccacgtc

SEQ ID NO: 648 - DNA, 498 bp, Zea mays
  misc_feature (343)..(343): n = any nucleotide
atggccaggacatcagcttgcccggttcttaagccgcccccctttcatcaaatatcgggacatcgattgtcacccgcccaccgagcattcccctctggcagccctcaccacgagatctttgctcaacccgctaggcagcgtcttgtagcacctgaggaagcgtgcggcggatgggttgagcgcgtggttgtgctccaggttcacatccgtgaggtgcagcaagtcgtcccccaggagtctggcgacgacggtggcctggcagttggtcttggccgtgggcctggcctggtaccaggcgtcctccttgccgttgccccacttgttgcagaagaggacgaggcgncggcagaggccggccttggtgaaggaggacttcttgacgcagacgccgaagcccgtgcgcagggcatagcgcttgtagaagttgagcacctcctcgtaggacttgaacaccatcccgtcccgcggcgtgcggtcgtccccgtaccgcgccgccgc

SEQ ID NO: 649 - DNA, 492 bp, Zea mays
  misc_feature (445)..(445): n = any nucleotide
atgggggcgctgtcgcggccggaggaggtgctggcgctggtaaagctgcgggtggcggcggggcagatcaagcgccagatcccgcccgaggagcactgggccttcgcctactccatgctccagaaggtgtcccgtagcttcgctctcgtcatccagcagctcggacccgaactccgcaatgccgtgtgcatcttctacctcgtgctccgtgccctcgacaccgttgaggacgacactagcatcccgaccgaggtgaaggtgcccatcctccaggaattctaccggcacatctaccaccgcgactggcattattcgtgtggaacaaatcactacaaaatgctaatggataagtttcgccacgtatccactgccttcctggagcttggtgaaggttaccaaaaggcaatagaagaagtcactaggcgaatgggtgcaggaatggcgnaatttatatgcaaagaggttgaaactgttgatgactatgacgagtgt

SEQ ID NO: 650 - DNA, 231 bp, Zea mays
  misc_feature (34)..(34): n = any nucleotide
atgtcgtcagcccacgcgtccgatttcgacgcancctcctccctctttaccgcggcgtgcacgcgtgcggagggcgcggatggcaccggcctcctccgcctccgcctccgcctccgcctcccccgttttcgtctgtgcctaaacccctgccccagcccgagggctgagcacgcacccggccctgacctcgagccccgtattcttgaggtcttcgtcgtgcacccccgcctg

SEQ ID NO: 651 - DNA, 291 bp, Zea mays
atggagatgctgagcatgctgaaggtggggtacaccatcctgcgcagcgagacgcccgcgacagacctcgtcaacaccttcatggactgggcggcgcgcaggtcccttatgctcctggccatcttcctcccgccgtactacatctacaagctcaccacgtctgcgttcgctgctgccgtgccagaggacgtcgcagggaaggttgtgctcatcaccggcgccgcctccggcatcggccaggtatgccaaccagtaactcctttgtgtacgcgtatttttgctgaaacaaac

SEQ ID NO: 652 - DNA, 264 bp, Zea mays
atggctgaccgggcgtccacgaccaccgcctcgccgccgccggcgagggcgggggtggtcgtgctcacggtggcggagccggcgagccagaagagcgcccagaagcagaagccgaccatcttgagcagcagccccgccgccatttccgcaggcggcgcgaaaaccgacgatcgatgccaagaaccaacaagagggacagcgcgcaaccggagggaagatgcaggtgggggaaagaggggctatctatcccctcttgaaggaaat

SEQ ID NO: 653 - DNA, 636 bp, Zea mays
atgacgggctcgaaacccgcgcccgccgcctcgcagaaccctagcgcggtcccgcatcgtcgtcctcctcctcctcctcctcctcctcctccgccgccggtgacagcggttgcgagggtgcgcgaagaaggcgagctctcctccggcgccgacgacgacgagactctgcaaactcagctaggtgccgcatccattcttgggaagtttgtggaggctggatctcaagtgccatcggcaagtctcctcggtaaaggcagtaacaccttgattgtctcaaatgctctgaatcataaagcgtctgctccaagttacaagaagatcatgagggtgaatcaggggcaattcaaacctggcactaaccggaatctttcatggcagaagcctgtgtcaagtgataaccttctgataactttctcagatgatgatagtggggcagactctgggaagacagggcgagataaagttaggaaggctagctctcaaggtacacagagaacagggaacagtatgcaaactacgatcatgagagaggaaggatctcagccaaaaaaccttggttcaaaaataggtgcctgcacacttggcctgcttttccattcacacatagaaaatgtgggggcccggcagggcatcagg

SEQ ID NO: 654 - DNA, 324 bp, Zea mays
atgctaactgagttcacctttaccccactgtttttctcctttggtctggcatcgatcccagacgggacctttttcttcttgatggacttaacactggcagcgagcactagctgtgcccttgtctttctccgcgttcctcttggcagcgttccccttgccgcgcccctggccgcctcggggcacccgcgggaccgcggcgaagagctcggcgacggagcgcttgcggcgcttggccgccaacctcctctccacctcggcctcctcctcctccaccgctgccgcctcgtcccgccaccaccggaaccgccgcacctccatgggcgg

SEQ ID NO: 655 - DNA, 294 bp, Zea mays
  misc_feature (220)..(255): n = any nucleotide
  misc_feature (259)..(259): n = any nucleotide
  misc_feature (274)..(274): n = any nucleotide
  misc_feature (288)..(288): n = any nucleotide
atggatggttacactatcgcatttgggatcagaaatgtgacgcacattgagaaagctctgtcagaagcttacagggttctaaagcaaggggggaggttcctatgcttggagttgagtcatgtggatgtccctatttttaaagagatttatgatgtttactcgttttctatggttccggctattggagagctggttgcggacgcgtgggcggacgcgtggnnnnnnnnnnnnnnnnnnnnnnnnnnnnnnnnnnnnaganctgggggtttttgtnacaaacaaaggtgnccgtcg

SEQ ID NO: 656 - DNA, 519 bp, Zea mays
atggcgatccgctccaaggcctggatctcgctgttgctcgcgctggccgtcgcgctctccgcccgggcggaggaggagcccgccgccgccgcggagggcgaggccgtgctcaccctcgacgtcgacagcttcgacgaggccgtcgccaagcaccccttcatggtcgtcgagttctacgccccctggtgtgggcactgcaagaaacttgctccagagtatgagaatgcggccaaggcacttagcaagcatgacccaccgattgttctcgctaaggttgatgctaacgaggagaagaacaggccgcttgctaccaagtacgagatccaagggttcccaaccatcaagatattcagggaccaggggaagaacattcaggaatacaagggccctagggaggctgatggcattgtggattacttgaagaagcaggttagccctgcgtccaaggagatcaagtcaccagaagatgcgacggcccttatcgatgacaagaagatctacatttgttggtatcttcgc

SEQ ID NO: 657 - DNA, 522 bp, Zea mays
atgctaaatttctccattgcatatgggaaaacggctcatgggcttgctcgtgattggaaggtttctgttaaggaagcaaaagatacactgaaactctggtatagcgatagaaaggaagttctggcttggcaaatgaagcagaaacagctagcacatgagaagcgtgaagtttatactttgcttgggcgatcacgccgttttccaaatatggctcatgcaacttctggccaaaggggtcacattgagcgtgctgctatcaatgctcctgtacagggcagtgcagctgatgttgctatgtgtgcaatgcttgagatagacaggaatactcgtcttaaggagcttggttggacgctactcttgcaggtgcatgatgaagtgatactggaagggccttcagagtctgcggagctggccaagtccatagttgttgagtgcatgtctaagcccttctatggcaccaatatcctgaaggtcgaccttgctgttgatgccaagtgtgcacagaattggtatgcggccaaa

SEQ ID NO: 658 - DNA, 432 bp, Zea mays
atgggaccccgcggcgtcgccctagcgctcctcgcggcggcgctcctccaggccctcgcccccgcgtcggcggcggcggcggcggcggcggcggcggggggcctggtgcggctcgcgctgaagaagcagcccgtcgaccagaacgcccgcgtcgccgcgcgcctctccgctgaggagaggcagcgcctcctcctccgcggcgccaacgccctgtgctcggccggcggcgacgacgactccgacgtcatcgcgctcaataactacatgaacgcgcagcactttggggagatcggcgtcgggacgccgcccgcagaagttcaccgtcatcttcgacaccggcagctccaacctctgggcgccgtcctccaagagctatttctcgacagcttgctacttccactcgcgctaccagcacggcgcagccagtactta

SEQ ID NO: 659 - DNA, 564 bp, Zea mays
atgccaatgggttgtcgagttcgccaatggatctttagaaataccacatctgtggcaatcttttgtatcctgtttgcagcactgctttggatactgtggatcatttacaagaggcggacattatctaatagagctgagcaaatatacgagcaggtctgtgaaatccttgaagataatgctgtaaacgccgagattgacaactccaattctgaggtttgggtggttacctcctggctcagggatcacctgttggttcctcaagagagaaagaattctttcctgtggaagaaggtcgaagaactcatacgagaagattctcgaatagatcaatatccaaaggtgattaaaggggagtcgaaagttgtttacgagtggcaagcaagtggctcgcttagtgcaaagattaaaaaggtgcaaggtgcaagggccaagtcaaggactggtgtaggtgtcataaaatttggggaagaaatgagtgcttcctccttgggtgaggtgagggagcagggctcgtgtgatttaacacgcgaagaaagaagtaaggacaaggtcacgtgcagtgat

SEQ ID NO: 660 - DNA, 471 bp, Zea mays
atgacggggacgccggagacccccagcgcgcgcatggcggcgtacgcggcgtcggccctggcgtcgctggcctccgacgggcctgacgacttgaggaccagcggcgagccggccgacgcaagggaccggaggacgcggcccacgacgcccgaccagtccgggtccggggcggccagcgtctcggcggacagcgcgctggacacgctgacgcggccggcgagccccgcggcggcgagcgccgagcggaggttggccatcgccgggaccaggaagtgggcgctgggcggggagcgcgccggcgcgtcgtcgcccgccaggacgtgcgtgatcctggtcgccgggacgaaccgcgccacgctggcggccacccagaggtcggcctcctcctggaactcggccacgtgctccagctgctcgttggggacggtgagcatgacctccgcgccgctgcctgccagcgagctcagcagc

SEQ ID NO: 661 - DNA, 741 bp, Zea mays
atgtcgtcggcggtggaggccatctcctgccccaaggtcgacgtccccgccggcccggagccgggggagccggccaaggaagcggcgccgcccgcggagcactgcgacacggcgcccaacggcaagtgcgcgccgcgttgtcacggggaggaggaggaggaggaggaggacgaggaggacgaggagaaggcccccaaggccatcgacctcggtcccatggtcagcatcaaggagcagctcgagaaggacaaggacgacgagagcctgcggcgatggaaggagcagctcctcggcggcgtggacttgaactccgtgggagagacgctggagccggacgtgaagataatgagcctgtccatcctgtcgcccgggcggcccgacatcgtgctgccgctgccggtggagcccaacggcaagggcgtgtggttcaccctcaaggaaggctccccgtaccggctcaagttcaccttctccgtcagcaacaacatcgtctccggcctccgctacaccaacaccgtctggaagacggggctcaaagttgacagagccaaggagatgctcggcacgttcagcccccagctggagccctacacgtacgtgacgccggaggacaccaccccgtcgggaatgtttgcccgggggtcctactctgccaggaccaagttcctcgacgacgaccgcaagtgctacctggagatcaactacaccttcgacatccgccgggagtggccgtcgacgagc

SEQ ID NO: 662 - DNA, 63 bp, Artificial Sequence
  primer
ggccagtgaattgtaatacgactcactatagggaggcggtttttttttttttttttttttttt
